(19) United States
(12) Patent Application Publication
(10) Pub. No.: US 2003/0162194 A1
(43) Pub. Date: Aug. 28, 2003

(54) Diagnosis of diseases associated with apoptosis

(76) Inventors: Alexander Olek, Berlin (DE); Christian Piepenbrock, Berlin (DE); Kurt Berlin, Stahnsdorf (DE)

Correspondence Address: DAVIDSON, DAVIDSON & KAPPEL, LLC, 485 SEVENTH AVENUE, 14TH FLOOR, NEW YORK, NY, 10018, US

(21) Appl. No.: 10/240,452

(22) PCT Filed: Apr. 6, 2001
(86) PCT No.: PCT/EP01/03969

(30) Foreign Application Priority Data
Apr. 6, 2000 (DE) 10019058.8
Apr. 7, 2000 (DE) 100191738
Jun. 30, 2000 (DE) 100325297
Sep. 1, 2000 (DE) 10043826.1

(51) Int. Cl. C12Q 1/68; C07H 21/04; C12M 1/34; B05D 3/00

(52) U.S. Cl. 435/6; 435/287.2; 536/24.3; 427/2.11

(57) ABSTRACT

The present invention relates to the chemically modified genomic sequences of genes associated with apoptosis, to oligonucleotides and/or PNA-oligomers for detecting the cytosine methylation state of genes associated with apoptosis which are directed against the sequence, as well as to a method for ascertaining genetic and/or epigenetic parameters of genes associated with apoptosis.

### FIELD OF THE INVENTION

[0001] The levels of observation that have been well studied by the methodological developments of recent years in molecular biology, are the genes themselves, the translation of these genes into RNA, and the resulting proteins. The question of which gene is switched on at which point in the course of the development of an individual, and how the activation and inhibition of specific genes in specific cells and tissues are controlled is correlatable to the degree and character of the methylation of the genes or of the genome. In this respect, pathogenic conditions may manifest themselves in a changed methylation pattern of individual genes or of the genome.

[0002] The present invention relates to nucleic acids, oligonucleotides, PNA-oligomers and to a method for the diagnosis and/or therapy of diseases which have a connection with the genetic and/or epigenetic parameters of genes associated with apoptosis and, in particular, with the methylation status thereof.

### PRIOR ART

[0003] During embryogenesis, tissue turnover or metamorphosis, multi cellular eukaryotic organisms retain the ability to eliminate unwanted cells. This form of programmed cell death is termed ‘apoptosis’. Apoptosis takes place in response to a variety of stimuli that trigger biochemical pathways that result in a characteristic set of processes leading to cell death.

[0004] The stimuli that trigger apoptosis can include the levels of essential growth factors, treatment with glucocorticoids, irradiation, and activation of certain receptors. These trigger a variety of biochemical pathways. The ‘classical’, pathway comprises of a ligand-receptor interaction which triggers the activation of a protease. This leads to the release of cytochrome C from mitochondria. This in turn activates a series of proteases, whose actions culminate in the destruction of cellular structures.

[0005] For example, a common pathway involves activation of caspase-8 by oligomerization at an activated surface receptor. Caspase-8 cleaves Bid, which triggers release of cytochrome c from mitochondria. The cytochrome c causes Apaf-1 to oligomerize with caspase-9. The activated caspase-9 cleaves procaspase-3, whose two subunits then form the active protease. This cleaves various targets that lead to cell death. Cell death by apoptosis is characterised by processes in which the cell becomes more compact, blebbing occurs at the membranes, chromatin becomes condensed, and DNA is fragmented.

[0006] The correct control of apoptosis is probably essential to all higher organisms. For example, in the model organism C. Elegans 131 of the 1090 cells die at defined points of the lifecycle of the organism. In vertebrates, the importance of apoptosis has been proved using knockout mouse models. In humans, apoptosis pathways have been implicated in a variety of diseases including neurodegenerative diseases, ageing and cancer:

[0007] HIV infection; Badley et. al. “Mechanisms of HIV-associated lymphocyte apoptosis” Blood,Vol. 96; 2951-2964 (2000).

[0008] Bloom Syndrome; Bischof et. al. ‘Selective cleavage of BLM, the Bloom syndrome protein, during apoptotic cell death.’ J Biol Chem Jan. 11, 2001.

[0009] Cardiomyopathy; Narula et. al. “Apoptosis in heart failure: release of cytochrome c from mitochondria and activation of caspase-3 in human cardiomyopathy” Proc Natl Acad Sci USA.;96:8144-8149 (1999).

[0010] Familial Alzheimers; Simian et. al. Presenilin-1 P264L Knock-In Mutation: Differential Effects on Aβ Production, Amyloid Deposition, and Neuronal Vulnerability The Journal of Neuroscience, 20(23):8717-8726 (1999).

[0011] Aging; Schindowski et. al. ‘Age-related changes of apoptotic cell death in human lymphocytes.’ Neurobiol Aging 2000 Sep-Oct;21(5):661-70.

[0012] Herpes simplex virus infection; Perng et. al. “Virus-Induced Neuronal Apoptosis Blocked by the Herpes Simplex Virus Latency-Associated Transcript” Science 287: 1500-1503 (2000).

[0013] Renal ischemia; Yuexian et. al. “Downregulation of the calpain inhibitor protein calpastatin by caspases during renal ischemia-reperfusion” Am. J. Physiol. 279: 509-517.

[0014] Amyotrophic lateral sclerosis; Li et. al. “Functional Role of Caspase-1 and Caspase-3 in an ALS Transgenic Mouse Model” Science 288 (5464); 335-339 (2000).

[0015] Breast cancer; Sierra et. al. ‘Bcl-2 with loss of apoptosis allows accumulation of genetic alterations: a pathway to metastatic progression in human breast cancer.’ Int J Cancer. Mar. 20, 2000;89(2):142-7.

[0016] The complexities of the pathways leading to apoptosis allow for many mechanisms by which it can be diverted. In addition to genomic mutations, the epigenetic control of genes has been implicated in disruptions to apoptosis pathways. The epigenetic parameter that has been best characterised, DNA methylation, has been implicated as a key factor in the resistance of tumors to chemotherapy. It has been shown (Soengas et al “Inactivation of the apoptosis effector Apaf-1 in malignant melanoma” Nature 409; 207-211;2001) that in malignant melanomas disruptions in the apoptosis pathway could be attributed to silencing of the Apaf-1 gene.

[0017] The identification of methylation of apoptosis genes as a factor in tumor malignancy opens up the possibility of creating alternative methods of treatment. Methylation based therapies could have considerable advantages over current methods of treatment such as chemotherapy, surgery and radiotherapy. They may even, as demonstrated by Soengas et al, provide a means of treating tumors resistant to conventional therapies. In addition to the development of methylation specific therapies, experiments with Min mice have shown that inhibition of DNA methylation can suppress tumor initiation (Laird et. al. ‘Suppression of intestinal neoplasia by DNA hypomethylation’ Cell 81; 197-2051995). Furthermore, DNA methylation analysis may provide novel means for tumor diagnosis as suggested by Rosas et. al. ‘Promoter hypermethylation patterns of p16, O6-methylguanine-DNA-methyltransferase, and death-associated protein kinase in tumors and saliva of head and neck cancer patients.’ Cancer Res Feb. 1, 2001;61(3):939-42.

[0018] 5-methylcytosine is the most frequent covalent base modification in the DNA of eukaryotic cells. It plays a role, for example, in the regulation of the transcription, in genetic imprinting, and in tumorigenesis. Therefore, the identification of 5-methylcytosine as a component of genetic information is of considerable interest. However, 5-methylcytosine positions cannot be identified by sequencing since 5-methylcytosine has the same base pairing behavior as cytosine. Moreover, the epigenetic information carried by 5-methylcytosine is completely lost during PCR amplification.

[0019] A relatively new and currently the most frequently used method for analyzing DNA for 5-methylcytosine is based upon the specific reaction of bisulfite with cytosine which, upon subsequent alkaline hydrolysis, is converted to uracil which corresponds to thymidine in its base pairing behavior. However, 5-methylcytosine remains umnodified under these conditions. Consequently, the original DNA is converted in such a manner that methylcytosine, which originally could not be distinguished from cytosine by its hybridization behavior, can now be detected as the only remaining cytosine using “normal” molecular biological techniques, for example, by amplification and hybridization or sequencing. All of these techniques are based on base pairing which can now be fully exploited. In terms of sensitivity, the prior art is defined by a method which encloses the DNA to be analyzed in an agarose matrix, thus preventing the diffusion and renaturation of the DNA (bisulfite only reacts with single-stranded DNA), and which replaces all precipitation and purification steps with fast dialysis (Olek A, Oswald J, Walter J. A modified and improved method for bisulphite based cytosine methylation analysis. Nucleic Acids Res. Dec. 15, 1996;24(24):5064-6). Using this method, it is possible to analyze individual cells, which illustrates the potential of the method. However, currently only individual regions of a length of up to approximately 3000 base pairs are analyzed, a global analysis of cells for thousands of possible methylation events is not possible. However, this method cannot reliably analyze very small fragments from small sample quantities either. These are lost through the matrix in spite of the diffusion protection.

[0020] An overview of the further known methods of detecting 5-methylcytosine may be gathered from the following review article: Rein, T., DePamphilis, M. L., Zorbas, H., Nucleic Acids Res. 1998, 26, 2255.

[0021] To date, barring few exceptions (e.g., Zeschnigk M, Lich C, Buiting K, Doerfier W, Horsthemke B. A single-tube PCR test for the diagnosis of Angelman and Prader-Willi syndrome based on allelic methylation differences at the SNRPN locus. Eur J Hum Genet. 1997 March-April;5(2):94-8) the bisulfite technique is only used in research. Always, however, short, specific fragments of a known gene are amplified subsequent to a bisulfite treatment and either completely sequenced (Olek A, Walter J. The pre-implantation ontogeny of the H19 methylation imprint. Nat Genet. 1997 Nov;17(3):275-6) or individual cytosine positions are detected by a primer extension reaction (Gonzalgo M L, Jones P A. Rapid quantitation of methylation differences at specific sites using methylation-sensitive single nucleotide primer extension (Ms-SNuPE). Nucleic Acids Res. Jun. 15, 1997;25(12):2529-31, WO 95/00669) or by enzymatic digestion (Xiong Z, Laird P W. COBRA: a sensitive and quantitative DNA methylation assay. Nucleic Acids Res. Jun. 15, 1997;25(12):2532-4). In addition, detection by hybridization has also been described (Olek et al., WO 99/28498).

[0022] Further publications dealing with the use of the bisulfite technique for methylation detection in individual genes are: Grigg G, Clark S. Sequencing 5-methylcytosine residues in genomic DNA. Bioessays. 1994 June;16(6):431-6, 431; Zeschnigk M, Schmitz B, Dittrich B, Buiting K, Horsthemke B, Doerfler W. Imprinted segments in the human genome: different DNA methylation patterns in the Prader-Willi/Angelman syndrome region as determined by the genomic sequencing method. Hum Mol Genet. 1997 March;6(3):387-95; Feil R, Charlton J, Bird A P, Walter J, Reik W. Methylation analysis on individual chromosomes: improved protocol for bisulphite genomic sequencing. Nucleic Acids Res. Feb. 25, 1994;22(4):695-6; Martin V, Ribieras S, Song-Wang X, Rio MC, Dante R. Genomic sequencing indicates a correlation between DNA hypomethylation in the 5′ region of the pS2 gene and its expression in human breast cancer cell lines. Gene. May 19, 1995;157(1-2):261-4; WO 97/46705, WO 95/15373 and WO 97/45560.

[0023] An overview of the Prior Art in oligomer array manufacturing can be gathered from a special edition of Nature Genetics (Nature Genetics Supplement, Volume 21, January 1999), published in January 1999, and from the literature cited therein.

[0024] Fluorescently labeled probes are often used for the scanning of immobilized DNA arrays. The simple attachment of Cy3 and Cy5 dyes to the 5′-OH of the specific probe are particularly suitable for fluorescence labels. The detection of the fluorescence of the hybridized probes may be carried out, for example via a confocal microscope. Cy3 and Cy5 dyes, besides many others, are commercially available.

[0025] Matrix Assisted Laser Desorption Ionization Mass Spectrometry (MALDI-TOF) is a very efficient development for the analysis of biomolecules (Karas M, Hillenkamp F. Laser desorption ionization of proteins with molecular masses exceeding 10,000 daltons. Anal Chem. Oct. 15, 1988;60(20):2299-301). An analyte is embedded in a light-absorbing matrix. The matrix is evaporated by a short laser pulse thus transporting the analyte molecule into the vapor phase in an unfragmented manner. The analyte is ionized by collisions with matrix molecules. An applied voltage accelerates the ions into a field-free flight tube. Due to their different masses, the ions are accelerated at different rates. Smaller ions reach the detector sooner than bigger ones.

[0026] MALDI-TOF spectrometry is excellently suited to the analysis of peptides and proteins. The analysis of nucleic acids is somewhat more difficult (Gut I G, Beck S. DNA and Matrix Assisted Laser Desorption Ionization Mass Spectrometry. Current Innovations and Future Trends. 1995, 1; 147-57). The sensitivity to nucleic acids is approximately 100 times worse than to peptides and decreases disproportionally with increasing fragment size. For nucleic acids having a multiply negatively charged backbone, the ionization process via the matrix is considerably less efficient. In MALDI-TOF spectrometry, the selection of the matrix plays an eminently important role. For the desorption of peptides, several very efficient matrixes have been found which produce a very fine crystallization. There are now several responsive matrixes for DNA, however, the difference in sensitivity has not been reduced. The difference in sensitivity can be reduced by chemically modifying the DNA in such a manner that it becomes more similar to a peptide. Phosphorothioate nucleic acids in which the usual phosphates of the backbone are substituted with thiophosphates can be converted into a charge-neutral DNA using simple alkylation chemistry (Gut I G, Beck S. A procedure for selective DNA alkylation and detection by mass spectrometry. Nucleic Acids Res. Apr. 25, 1995;23(8):1367-73). The coupling of a charge tag to this modified DNA results in an increase in sensitivity to the same level as that found for peptides. A further advantage of charge tagging is the increased stability of the analysis against impurities which make the detection of unmodified substrates considerably more difficult. Genomic DNA is obtained from DNA of cell, tissue or other test samples using standard methods. This standard methodology is found in references such as Fritsch and Maniatis eds., Molecular Cloning: A Laboratory Manual, 1989.

### Description

[0027] The object of the present invention is to provide the chemically modified DNA of genes associated with apoptosis, as well as oligonucleotides and/or PNA-oligomers for detecting cytosine methylations, as well as a method which is particularly suitable for the diagnosis and/or therapy of genetic and epigenetic parameters of genes associated with apoptosis. The present invention is based on the discovery that genetic and epigenetic parameters and, in particular, the cytosine methylation pattern of genes associated with apoptosis are particularly suitable for the diagnosis and/or therapy of diseases associated with apoptosis.

[0028] This objective is achieved according to the present invention using a nucleic acid containing a sequence of at least 18 bases in length of the chemically pretreated DNA of genes associated with apoptosis according to one of Seq. ID No.1 through Seq. ID No.78 and sequences complementary thereto and/or a sequence of a chemically pretreated DNA of genes according to table 1 and sequences complementary thereto. In the table, after the listed gene designations, the respective data bank numbers (accession numbers) are specified which define the appertaining gene sequences as unique. GenBank was used as the underlying data bank, which is located at the National Institute of Health, internet address www.ncbi.nlm.nih.gov.

[0029] The chemically modified nucleic acid could heretofore not be connected with the ascertainment of genetic and epigenetic parameters.

[0030] The object of the present invention is further achieved by an oligonucleotide or oligomer for detecting the cytosine methylation state in chemically pretreated DNA, containing at least one base sequence having a length of at least 13 nucleotides which hybridizes to a chemically pretreated DNA of genes associated with apoptosis according to Seq. ID No.1 through Seq. ID No.78 and sequences complementary thereto and/or a sequence of a chemically pretreated DNA of genes according to table 1 and sequences complementary thereto. The oligomer probes according to the present invention constitute important and effective tools which, for the first time, make it possible to ascertain the genetic and epigenetic parameters of genes associated with apoptosis. The base sequence of the oligomers preferably contains at least one CpG dinucleotide. The probes may also exist in the form of a PNA (peptide nucleic acid) which has particularly preferred pairing properties. Particularly preferred are oligonucleotides according to the present invention in which the cytosine of the CpG dinucleotide is the 5th-9th nucleotide from the 5′-end of the 13-mer; in the case of PNA-oligomers, it is preferred for the cytosine of the CpG dinucleotide to be the 4th-6th nucleotide from the 5′-end of the 9-mer.

[0031] The oligomers according to the present invention are normally used in so called “sets” which contain at least one oligomer for each of the CpG dinucleotides of the sequences of Seq. ID No.1 through Seq. ID No.78 and sequences complementary thereto and/or a sequence of a chemically pretreated DNA of genes according to table 1 and sequences complementary thereto. Preferred is a set which contains at least one oligomer for each of the CpG dinucleotides from one of Seq. ID No.1 through Seq. ID No.78 and sequences complementary thereto and/or a sequence of a chemically pretreated DNA of genes according to table 1 and sequences complementary thereto.

[0032] Moreover, the present invention makes available a set of at least two oligonucleotides which can be used as so-called “primer oligonucleotides” for amplifying DNA sequences of one of Seq. ID No. 1 through Seq. ID No.78 and sequences complementary thereto and/or a sequence of a chemically pretreated DNA of genes according to table 1 and sequences complementary thereto, or segments thereof.

[0033] In the case of the sets of oligonucleotides according to the present invention, it is preferred that at least one oligonucleotide is bound to a solid phase.

[0034] The present invention moreover relates to a set of at least 10 n (oligonucleotides and/or PNA-oligomers) used for detecting the cytosine methylation state in chemically pretreated genomic DNA (Seq. ID No.1 through Seq. ID No.78 and sequences complementary thereto and/or a sequence of a chemically pretreated DNA of genes according to table 1 and sequences complementary thereto). These probes enable diagnosis and/or therapy of genetic and epigenetic parameters of genes associated with apoptosis. The set of oligomers may also be used for detecting single nucleotide polymorphisms (SNPs) in the chemically pretreated DNA of genes associated with apoptosis according to one of Seq. ID No.1 through Seq. ID No.78 and sequences complementary thereto and/or a sequence of a chemically pretreated DNA of genes according to table I and sequences complementary thereto. According to the present invention, it is preferred that an arrangement of different oligonucleotides and/or PNA-oligomers (a so-called “array”) made available by the present invention is present in a manner that it is likewise bound to a solid phase. This array of different oligonucleotide- and/or PNA-oligomer sequences can be characterized in that it is arranged on the solid phase in the form of a rectangular or hexagonal lattice. The solid phase surface is preferably composed of silicon, glass, polystyrene, aluminum, steel, iron, copper, nickel, silver, or gold. However, nitrocellulose as well as plastics such as nylon which can exist in the form of pellets or also as resin matrices are possible as well.

[0035] Therefore, a further subject matter of the present invention is a method for manufacturing an array fixed to a carrier material for analysis in connection with diseases associated with apoptosis in which method at least one oligomer according to the present invention is coupled to a solid phase. Methods for manufacturing such arrays are known, for example, from U.S. Pat. No. 5,744,305 by means of solid-phase chemistry and photolabile protecting groups.

[0036] A further subject matter of the present invention relates to a DNA chip for the analysis of diseases associated with apoptosis which contains at least one nucleic acid according to the present invention. DNA chips are known, for example, for U.S. Pat. No. 5,837,832. Moreover, a subject matter of the present invention is a kit which may be composed, for example, of a bisulfite-containing reagent, a set of primer oligonucleotides containing at least two oligonucleotides whose sequences in each case correspond or are complementary to an 18 base long segment of the base sequences specified in the appendix (Seq. ID No.1 through Seq. ID No.78 and sequences complementary thereto and/or a sequence of a chemically pretreated DNA of genes according to table 1 and sequences complementary thereto), oligonucleotides and/or PNA-oligomers as well as instructions for carrying out and evaluating the described method. However, a kit along the lines of the present invention can also contain only part of the aforementioned components.

[0037] The present invention also makes available a method for ascertaining genetic and/or epigenetic parameters of genes associated with the cycle cell by analyzing cytosine methylations and single nucleotide polymorphisms, including the following steps:

[0038] In the first step of the method, a genomic DNA sample is chemically treated in such a manner that cytosine bases which are unmethylated at the 5′-position are converted to uracil, thymine, or another base which is dissimilar to cytosine in terms of hybridization behavior. This will be understood as ‘chemical pretreatment’ hereinafter.

[0039] The genomic DNA to be analyzed is preferably obtained form usual sources of DNA such as cells or cell components, for example, cell lines, biopsies, blood, sputum, stool, urine, cerebral-spinal fluid, tissue embedded in paraffin such as tissue from eyes, intestine, kidney, brain, heart, prostate, lung, breast or liver, histologic object slides, or combinations thereof.

[0040] The above described treatment of genomic DNA is preferably carried out with bisulfite (hydrogen sulfite, disulfite) and subsequent alkaline hydrolysis which results in a conversion of non-methylated cytosine nucleobases to uracil or to another base which is dissimilar to cytosine in terms of base pairing behavior. Fragments of the chemically pretreated DNA are amplified, using sets of primer oligonucleotides according to the present invention, and a, preferably heat-stable polymerase. Because of statistical and practical considerations, preferably more than ten different fragments having a length of 100-2000 base pairs are amplified. The amplification of several DNA segments can be carried out simultaneously in one and the same reaction vessel. Usually, the amplification is carried out by means of a polymerase chain reaction (PCR).

[0041] In a preferred embodiment of the method, the set of primer oligonucleotides includes at least two olignonucleotides whose sequences are each reverse complementary or identical to an at least 18 base-pair long segment of the base sequences specified in the appendix (Seq. ID No.1 through Seq. ID No.78 and sequences complementary thereto and/or a sequence of a chemically pretreated DNA of genes according to table 1 and sequences complementary thereto). The primer oligonucleotides are preferably characterized in that they do not contain any CpG dinucleotides.

[0042] According to the present invention, it is preferred that at least one primer oligonucleotide is bonded to a solid phase during amplification. The different oligonucleotide and/or PNA-oligomer sequences can be arranged on a plane solid phase in the form of a rectangular or hexagonal lattice, the solid phase surface preferably being composed of silicon, glass, polystyrene, aluminum, steel, iron, copper, nickel, silver, or gold, it being possible for other materials such as nitrocellulose or plastics to be used as well.

[0043] The fragments obtained by means of the amplification can carry a directly or indirectly detectable label. Preferred are labels in the form of fluorescence labels, radionuclides, or detachable molecule fragments having a typical mass which can be detected in a mass spectrometer, it being preferred that the fragments that are produced have a single positive or negative net charge for better detectability in the mass spectrometer. The detection may be carried out and visualized by means of matrix assisted laser desorption/ionization mass spectrometry (MALDI) or using electron spray mass spectrometry (ESI).

[0044] The amplificates obtained in the second step of the method are subsequently hybridized to an array or a set of oligonucleotides and/or PNA probes. In this context, the hybridization takes place in the manner described in the following. The set of probes used during the hybridization is preferably composed of at least 10 oligonucleotides or PNA-oligomers. In the process, the amplificates serve as probes which hybridize to oligonucleotides previously bonded to a solid phase. The non-hybridized fragments are subsequently removed. Said oligonucleotides contain at least one base sequence having a length of 13 nucleotides which is reverse complementary or identical to a segment of the base sequences specified in the appendix, the segment containing at least one CpG dinucleotide. The cytosine of the CpG dinucleotide is the 5th to 9th nucleotide from the 5′-end of the 13-mer. One oligonucleotide exists for each CpG dinucleotide. Said PNA-oligonomers contain at least one base sequence having a length of 9 nucleotides which is reverse complementary or identical to a segment of the base sequences specified in the appendix, the segment containing at least one CpG dinucleotide. The cytosine of the CpG dinucleotide is the 4th to 6th nucleotide seen from the 5′-end of the 9-mer. One oligonucleotide exists for each CpG dinucleotide.

[0045] In the fourth step of the method, the non-hybridized amplificates are removed.

[0046] In the final step of the method, the hybridized amplificates are detected. In this context, it is preferred that labels attached to the amplificates are identifiable at each position of the solid phase at which an oligonucleotide sequence is located.

[0047] According to the present invention, it is preferred that the labels of the amplificates are fluorescence labels, radionuclides, or detachable molecule fragments having a typical mass which can be detected in a mass spectrometer. The mass spectrometer is preferred for the detection of the amplificates, fragments of the amplificates or of probes which are complementary to the amplificates, it being possible for the detection to be carried out and visualized by means of matrix assisted laser desorption/ionization mass spectrometry (MALDI) or using electron spray mass spectrometry (ESI).

[0048] The produced fragments may have a single positive or negative net charge for better detectability in the mass spectrometer. The aforementioned method is preferably used for ascertaining genetic and/or epigenetic parameters of genes associated with apoptosis.

[0049] The oligomers according to the present invention or arrays thereof as well as a kit according to the present invention are intended to be used for the diagnosis and/or therapy of diseases associated with apoptosis by analyzing methylation patterns of genes associated with apoptosis. According to the present invention, the method is preferably used for the diagnosis and/or therapy of important genetic and/or epigenetic parameters within genes associated with apoptosis.

[0050] The method according to the present invention is used, for example, for the diagnosis and/or therapy of HIV infection, Bloom syndrome, cardiopathy,aging, neurodegenerative disorders, Herpes simplex virus infection, renal ischemia, amyotrophic lateral sclerosis, solid tumors and cancers.

[0051] The nucleic acids according to the present invention of Seq. ID No.1 through Seq. ID No.78 and sequences complementary thereto and/or a sequence of a chemically pretreated DNA of genes according to table 1 and sequences complementary thereto can be used for the diagnosis and/or therapy of genetic and/or epigenetic parameters of genes associated with apoptosis. The present invention moreover relates to a method for manufacturing a diagnostic agent and/or therapeutic agent for the diagnosis and/or therapy of diseases associated with apoptosis by analyzing methylation patterns of genes associated with apoptosis, the diagnostic agent and/or therapeutic agent being characterized in that at least one nucleic acid according to the present invention is used for manufacturing it, possibly together with suitable additives and auxiliary agents.

[0052] A further subject matter of the present invention relates to a diagnostic agent and/or therapeutic agent for diseases associated with apoptosis by analyzing methylation patterns of genes associated with apoptosis, the diagnostic agent and/or therapeutic agent containing at least one nucleic acid according to the present invention, possibly together with suitable additives and auxiliary agents.

[0053] The present invention moreover relates to the diagnosis and/or prognosis of events which are disadvantageous to patients or individuals in which important genetic and/or epigenetic parameters within genes associated with apoptosis said parameters obtained by means of the present invention may be compared to another set of genetic and/or epigenetic parameters, the differences serving as the basis for a diagnosis and/or prognosis of events which are disadvantageous to patients or individuals.

[0054] In the context of the present invention the term “hybridization” is to be understood as a bond of an oligonucleotide to a completely complementary sequence along the lines of the Watson-Crick base pairings in the sample DNA, forming a duplex structure. To be understood by “stringent hybridization conditions” are those conditions in which a hybridization is carried out at 60° C. in 2.5×SSC buffer, followed by several washing steps at 37° C. in a low buffer concentration, and remains stable.

[0055] The term “functional variants” denotes all DNA sequences which are complementary to a DNA sequence, and which hybridize to the reference sequence under stringent conditions and have an activity similar to the corresponding polypeptide according to the present invention.

[0056] In the context of the present invention, “genetic parameters” are mutations and polymorphisms of genes associated with apoptosis and sequences further required for their regulation. To be designated as mutations are, in particular, insertions, deletions, point mutations, inversions and polymorphisms and, particularly preferred, SNPs (single nucleotide polymorphisms).

[0057] In the context of the present invention, “epigenetic parameters” are, in particular, cytosine methylations and further chemical modifications of DNA bases of genes associated with apoptosis and sequences further required for their regulation. Further epigenetic parameters include, for example, the acetylation of histones which, however, cannot be directly analyzed using the described method but which, in turn, correlates with the DNA methylation.

[0058] In the following, the present invention will be explained in greater detail on the basis of the sequences and examples with reference to the accompanying figure without being limited thereto.

[0059] FIG. 1

[0060] FIG. 1 shows the hybridisation of fluorescent labelled amplificates to a surface bound olignonucleotide. Sample I being from healthy tissue and sample II being from pilocytic astrocytoma (tumor) tissue. Flourescence at a spot shows hybridisation of the amplificate to the olignonucleotide. Hybridisation to a CG olignonucleotide denotes methylation at the cytosine position being analysed, hybridisation to a TG olignonucleotide denotes no methylation at the cytosine position being analysed.

[0061] Sequence ID Nos. 1 to 74

[0062] Sequences having odd sequence numbers (e.g., Seq. ID No. 1, 3, 5, . . . ) exhibit in each case sequences of the chemically pretreated genomic DNAs of different genes associated with apoptosis. Sequences having even sequence numbers (e.g., Seq. ID No. 2, 4, 6, . . . ) exhibit in each case the sequences of the chemically pretreated genomic DNAs of genes associated with apoptosis which are complementary to the preceeding sequences (e.g., the complementary sequence to Seq. ID No.1 is Seq. ID No.2, the complementary sequence to Seq. ID No.3 is Seq. ID No.4, etc.)

[0063] Sequence ID Nos. 75 to 78

[0064] Sequence ID Nos. 75 to 78 show the sequences of oligonucleotides used in Example 1. The following example relates to a fragment of a gene associated with apoptosis, in this case, death-associated protein 1 (DAPK1) in which a specific CG-position is analyzed for its methylation status.

### Example 1

### Methylation Analysis in the Gene DAPK1 Associated with Apoptosis

[0065] The following example relates to a fragment of the gene DAPKI in which a specific CG-position is to be analyzed for methylation.

[0066] In the first step, a genomic sequence is treated using bisulfite (hydrogen sulfite, disulfite) in such a manner that all cytosines which are not methylated at the 5-position of the base are modified in such a manner that a different base is substituted with regard to the base pairing behavior while the cytosines methylated at the 5-position remain unchanged.

[0067] If bisulfite solution is used for the reaction, then an addition takes place at the non-methylated cytosine bases. Moreover, a denaturating reagent or solvent as well as a radical interceptor must be present. A subsequent alkaline hydrolysis then gives rise to the conversion of non-methylated cytosine nucleobases to uracil. The chemically converted DNA (sequence ID Nos. 73 and 74) is then used for the detection of methylated cytosines. In the second method step, the treated DNA sample is diluted with water or an aqueous solution. Preferably, the DNA is subsequently desulfonated (10-30 min, 90-100° C.) at an alkaline pH value. In the third step of the method, the DNA sample is amplified in a polymerase chain reaction, preferably using a heat-resistant DNA polymerase. In the present case, cytosines of the gene DAPK1 are analyzed. To this end, a defined fragment having a length of 465 bp is amplified with the specific primer oligonucleotides ATTAATATTATGTAAAGTGA (Sequence ID No. 75) and CTTACAACCATTCACCCACA (Sequence ID No. 76). This amplificate serves as a sample which hybridizes to an oligonucleotide previously bonded to a solid phase, forming a duplex structure, for example GTTATATCGTGGAGGATA (Sequence ID No. 77), the cytosine to be detected being located at position 135 of the amplificate. The detection of the hybridization product is based on Cy3 and Cy5 flourescently labeled primer oligonucleotides which have been used for the amplification. A hybridization reaction of the amplified DNA with the oligonucleotide takes place only if a methylated cytosine was present at this location in the bisulfite-treated DNA. Thus, the methylation status of the specific cytosine to be analyzed is inferred from the hybridization product.

[0068] In order to verify the methylation status of the position, a sample of the amplificate is further hybridized to another oligonucleotide previously bonded to a solid phase. Said olignonucleotide is identical to the oligonucleotide previously used to analyze the methylation status of the sample, with the exception of the position in question. At the position to be analysed said oligonucleotide comprises a thymine base as opposed to a cytosine base i.e GTTATATTGTGGAGGATA (Sequence ID No. 78). Therefore, the hybridisation reaction only takes place if an unmethylated cytosine was present at the position to be analysed. The procedure was carried out on cell samples from 2 patients, sample I being from normal healthy tissue and sample II being from a pilocytic astrocytoma tumor sample.

[0069] From the results (see FIG. 1) it can be seen that the sample I contained a mixture of both methylated and unmethylated cells at position of the amplificate whereas sample II contained only methylated cells at position 135 of the amplificate.

### Example 2

### Diagnosis of Diseases Associated with Apoptosis

[0070] In order to relate the methylation patterns to one of the diseases associated with apoptosis, it is initially required to analyze the DNA methylation patterns of a group of diseased and of a group of healthy patients. These analyses are carried out, for example, analogously to Example 1. The results obtained in this manner are stored in a database and the CpG dinucleotides which are methylated differently between the two groups are identified. This can be carried out by determining individual CpG methylation rates as can be done, for example, in a relatively imprecise manner, by sequencing or else, in a very precise manner, by a methylation-sensitive “primer extension reaction”. It is also possible for the entire methylation status to be analyzed simultaneously, and for the patterns to be compared, for example, by clustering analyses which can be carried out, for example, by a computer.

[0071] Subsequently, it is possible to allocate the examined patients to a specific therapy group and to treat these patients selectively with an individualized therapy.

[0072] Example 2 can be carried out, for example, for the following diseases:

[0073] HIV infection, Bloom syndrome, cardiopathy, aging, neurodegenerative disorders, Herpes simplex virus infection, renal ischemia, amyotrophic lateral sclerosis, solid tumors and cancers.

| | Database entry No. |
|---|---|
| | (GenBank, internet |
| Gene | address www.ncbi.nlm.nih.gov) |
| TNFRSF6 | (NM_000043), |
| TNFRSF6 | (NM_000043), |
| TNFRSF6 | (NM_000043), |
| BCL2 | (NM_000633), |
| BCL2L1 | (NM_001191), |
| BCL2L2 | (NM_004050), |
| BNIP3 | (NM_004052), |
| CASP3 | (NM_004346), |
| CASP7 | (NM_001227), |
| PDCD1 | (NM_005018), |
| SFRP5 | (NM_003015), |
| STK17A | (NM_004760), |
| REQ | (NM_006268) |

1. A nucleic acid comprising a sequence at least 18 bases in length of a segment of the chemically pretreated DNA of genes associated with apoptosis according to one of the sequences taken from the group comprising Seq. ID No.1 to Seq. ID No.74 and sequences complementary thereto.

2. A nucleic acid comprising a sequence at least 18 base pairs in length of a segment of the chemically pretreated DNA of genes associated with apoptosis according to one of the sequences according to one of the genes TNFRSF6 (NM_{—}000043), BCL2 (NM_{—}000633), BCL2 μl (NM_{—}001191), BCL2L2 (NM_{—}004050), BNIP3 (NM_{—}004052), CASP3 (NM_{—}004346), CASP7 (NM_{—}001227), PDCD1 (NM_{—}005018), SFRP5 (NM_{—}003015), STK17A (NM_{—}004760), REQ (NM_{—}006268) and sequences complementary thereto.

3. An oligomer, in particular an oligonucleotide or peptide nucleic acid (PNA)-oligomer, said oligomer comprising in each case at least one base sequence having a length of at least 9 nucleotides which hybridizes to or is identical to a chemically pretreated DNA of genes associated with apoptosis according to one of the Seq ID Nos 1 to 74 according to claim 1 or to a chemically pretreated DNA of genes according to claim 2 and sequences complementary thereto.

4. The oligomer as recited in claim 3; wherein the base sequence includes at least one CpG dinucleotide.

5. The oligomer as recited in claim 3;characterized in that the cytosine of the CpG dinucleotide is located approximately in the middle third of the oligomer.

6. A set of oligomers, comprising at least two oligomers according to any of claims 3 to 5.

7. A set of oligomers as recited in claim 6, comprising oligomers for detecting the methylation state of all CpG dinucleotides within one of the sequences according to Seq. ID Nos. 1 through 74 according to claim 1 or a chemically pretreated DNA of genes according to claim 2, and sequences complementary thereto.

8. A set of at least two oligonucleotides as recited in claim 3, which can be used as primer oligonucleotides for the amplification of DNA sequences of one of Seq. ID 1 through Seq. ID 74 and sequences complementary thereto and/or sequences of a chemically pretreated DNA of genes according to claim 2, and sequences complementary thereto and segments thereof.

9. A set of oligonucleotides as recited in claim 8, characterized in that at least one oligonucleotide is bound to a solid phase.

10. Use of a set of oligomer probes comprising at least ten of the oligomers according to any of claims 6 through 9 for detecting the cytosine methylation state and/or single nucleotide polymorphisms (SNPs) in a chemically pretreated genomic DNA according to claim 1 or a chemically pretreated DNA of genes according to claim 2.

11. A method for manufacturing an arrangement of different oligomers (array) fixed to a carrier material for analyzing diseases associated with the methylation state of the CpG dinucleotides of one of the Seq. ID 1 through Seq. ID 74 and sequences complementary thereto and/or chemically pretreated DNA of genes according to claim 2, wherein at least one oligomer according to any of the claims 3 through 5 is coupled to a solid phase.

12. An arrangement of different oligomers (array) obtainable according to claim 11.

13. An array of different oligonucleotide- and/or PNA-oligomer sequences as recited in claim 12, characterized in that these are arranged on a plane solid phase in the form of a rectangular or hexagonal lattice.

14. The array as recited in any of the claims 12 or 13, characterized in that the solid phase surface is composed of silicon, glass, polystyrene, aluminum, steel, iron, copper, nickel, silver, or gold.

15. A DNA- and/or PNA-array for analyzing diseases associated with the methylation state of genes, comprising at least one nucleic acid according to one of the preceding claims.

16. A method for ascertaining genetic and/or epigenetic parameters for the diagnosis and/or therapy of existing diseases or the predisposition to specific diseases by analyzing cytosine methylations, characterized in that the following steps are carried out:
a) in a genomic DNA sample, cytosine bases which are unmethylated at the 5-position are converted, by chemical treatment, to uracil or another base which is dissimilar to cytosine in terms of hybridization behavior;
b) fragments of the chemically pretreated genomic DNA are amplified using sets of primer oligonucleotides according to claim 8 or 9 and a polymerase, the amplificates carrying a detectable label;
c) Amplificates are hybridized to a set of oligonucleotides and/or PNA probes according to the claims 6 and 7, or else to an array according to one of the claims 12 through 15;
d) the hybridized amplificates are subsequently detected.

17. The method as recited in claim 16, characterized in that the chemical treatment is carried out by means of a solution of a bisulfite, hydrogen sulfite or disulfite.

18. The method as recited in one of the claims 16 or 17, characterized in that more than ten different fragments having a length of 100-2000 base pairs are amplified.

19. The method as recited in one of the claims 16 through 18, characterized in that the amplification of several DNA segments is carried out in one reaction vessel.

20. The method as recited in one of the claims 16 through 19, characterized in that the polymerase is a heat-resistant DNA polymerase.

21. The method as recited in claim 20, characterized in that the amplification is carried out by means of the polymerase chain reaction (PCR).

22. The method as recited in one of the claims 16 through 21, characterized in that the labels of the amplificates are fluorescence labels.

23. The method as recited in one of the claims 16 through 21, characterized in that the labels of the amplificates are radionuclides.

24. The method as recited in one of the claims 16 through 21, characterized in that the labels of the amplificates are detachable molecule fragments having a typical mass which are detected in a mass spectrometer.

25. The method as recited in one of the claims 16 through 21, characterized in that the amplificates or fragments of the amplificates are detected in the mass spectrometer.

26. The method as recited in one of the claims 24 and/or 25, characterized in that the produced fragments have a single positive or negative net charge for better detectability in the mass spectrometer

27. The method as recited in one of the claims 24 through 26, characterized in that detection is carried out and visualized by means of matrix assisted laser desorption/ionization mass spectrometry (MALDI) or using electron spray mass spectrometry (ESI).

28. The method as recited in one of the claims 16 through 27, characterized in that the genomic DNA is obtained from cells or cellular components which contain DNA, sources of DNA comprising, for example, cell lines, biopsies, blood, sputum, stool, urine, cerebral-spinal fluid, tissue embedded in paraffin such as tissue from eyes, intestine, kidney, brain, heart, prostate, lung, breast or liver, histologic object slides, and all possible combinations thereof.

29. A kit comprising a bisulfite (=disulfite, hydrogen sulfite) reagent as well as oligonucleotides and/or PNA-oligomers according to one of the claims 3 through 5.

30. The use of a nucleic acid according to claims 1 or 2, of an oligonucleotide or PNA-oligomer according to one of the claims 3 through 5, of a kit according to claim 29, of an array according to one of the claims 12 through 15, of a set of oligonucleotides according to one of claims 6 through 9 for the diagnosis of HIV infection, Bloom syndrome, cardiopathy, aging, neurodegenerative disorders, Herpes simplex virus infection, renal ischemia, amyotrophic lateral sclerosis, solid tumors and cancers.

31. The use of a nucleic acid according to claims 1 or 2, of an oligonucleotide or PNA-oligomer according to one of claims 3 through 5, of a kit according to claim 29, of an array according to one of the claims 12 through 15, of a set of oligonucleotides according to one of claims 6 through 9 for the therapy of HIV infection, Bloom syndrome, cardiopathy, aging, neurodegenerative disorders, Herpes simplex virus infection, renal ischemia, arnyotrophic lateral sclerosis, solid tumors and cancers.

32. A kit, comprising a bisulfite (=disulfite, hydrogen sulfite) reagent as well as oligonucleotides and/or PNA-oligomers according to one of claims 3 through 5.

The application's sequence listing, which the Patent Office published only in electronic form, follows.

SEQUENCE LISTING (78 sequences)

SEQ ID NO: 1 - DNA, 6536 bp, Artificial Sequence
  chemically treated genomic DNA (Homo sapiens)
ggcgtatatttgtaattttagttattcgggaggttgaggtaggagaattgtttgaatttgggaggtggaggtggaggttgcggtgagttgagattgcgttattgtattttagtttgggtaataagagtaaaattttattttttaaaataaaataaaataaaataaaataaaataaaataaaaaagtaattaaaaaatttattgaagtttttataagaaataaaatttttataatggaaattttagttgattaaatttttatgtaattaaataagtatgagtgataggttttgtgttttgtttagtaatttaataattttttaattttttgaaagtagaattattttaatttttatttgaaaaatttttataagagtttagaaaagagttatgtaaattgatatttaagttatatgggtttgggtaatttatttttagtgtttattgttaagatgatataggatatattaggtttttttttttttgtagggttttattttgttatttaggttgagtgttgtggtgtaattaaagtttattgaaattttaaatttcggggtttaagtaattttttaattttaattttttaagtagttgggattataggtatgcgttattatgtttggttaattttttgtattttttgtagagatagggttttattatgttgtttaggttggttttgaatttttgagtttaagattcgtttaattcggttttttaaagtgttgggattataggtgggagttattatatttggtttattaggtttttatttagtagagagaagatattaaagtaatatatttttaagttttttatgtattattttttttttttttttatataggaaatggtttgaagataatgatatagtgtgattttttgaaattttttttgggtagtggaagggtttagattttttttttttaatttaattagatgaagagtgagagtaagtagtatttaagagtatatagataggtatatatatgtatttgtattttaattattagggtcgtgttagtacggaaagtatttaataaagatttgatagatcgatttttagatgttgaattacgtgttttagtggtaaagattttaatggttttgttaaaattttagtgagtttttaagtattttaagatgttaaatatttgttttttatttggaaaatgtttataaatgttttatggggatatatttttattttaaaatttattatgaataaatattttgtaataaatagtaattaaagtatatttgttttaatttttgtagtaaaagattttataagagtaattaagaggtaattatttaaataataattatagaatttgtttataaaaaatatatataatatatatattttagagagatagggttttgttttgttttttaggttggagtatagtggtataattatgggttattgtagttttgattttttagatttaagttatttttttattttagttttttaagtatttgggattatagcgaatgttattatatttggttaatatttaaaaatttttcgtagatacggttttattatgttttttaggttggttttaaatttttgattttaagtaattttttcgttttagttttttaaagtgttgggattataggtatgaattattgggtttggtttttaaaattatttttgatatagtattgtgttattattttgtaaatatagtttaaattaaatttttttaatgaatgtaatatatttattataatgtaatataggaattattaatagtaaatttttgatgtgagggaaattttatttttataaagtttagttttttattaaagtttattttaggatagtaattaatttttttaaaatataaaaggttatttatttatttaggcgaagtttcgttttgttatttaggttggagtgtagtagtagattttggtttattgtaatttttattttttaggtttaagtgatttttttgttttaatttttgagtagttgggattatattaggtttagttaatttttgtgtttttggtagagatagggttttattatgttggataggttggttttaaatttttgattttaagtgattcgtttgtttcggttttttaaagtgttaggattataggcgtaagttattgtatttggtttaaaaaggttttttttttaatttatttaaaggaggttaagtattttaaggtataagagtcgtttatttaaaatagtaaatttagtatatttattttttttagattaaaattaatatatttcgtattagtaaaataaataatgttatttgttttttttttttttttttttgagaaggagttttgttttattttgtaggttggagtgtagtggtacgatttcggtttattgtaattttcgttttttgggtttaagtgatttttttgttttagttttttgagtagttgggattataggagtatgttattatgtttggtttttttgtatttttagtagatatagggttttgttatgttggttaggttggttttaaatttttgattttaggtgatttatttattttggttttttaaagtgttgggagtataggtatgagttattgtcggtaggttgataattttattgtttttgaagagggcgtttaattattttattgtgataaaattttgtttgtttgttttttgagatggagtttcgttttgttgtttaggttggagtgtaatggtacgattttagtttattgtaatttttatttttttatttcgagtgatttttttgttttagttttttgaatagttgggattgtaggtttgtgttattaagtttggttaatttttgtattttttgtagagatagggttttattatgttggttagtttggttttgaatttttgattttatgatttgtttatttcggttttttaaagtgttgggattataggtgtgagttatcgcgtttagtcgtaataaattttttaattttgaaaaatatattatttgggatgagttattagtaaagtataattttatatgtagtagtataaaaaatgtttagatgtttagggttttttttaaaattttattattttggaagattaataatagttttattaaataattttatatatgaatgaaaaatggagaaaaattttattaagatgttaattttattaaaatgaaatgggttatttttttttttcgttagaaaaaaaaaggttgggaaaataaaatttataagttggttttttttttttttttttttttacgagttggttttaaggttatttttaatatttattttttttaatgatattaatatatcgttatttatttgattttaaaattgtaattggttagttttaagtgaatataagtgttatgtttttgtagttttattatatttaatttgtaatttatttaataaaagattttaaatttataatgtatgtacggtgattaaaatatgagtatttttttaagttttgttattataacgtttgtttttttgggagtataatgatatggtttttttttttttttttttttgagacggagtttcgttcggtcgtttaggttggagtgtagtgatgcgattttggtttatagtaattttcgtttttcgggtttaagcgatttttttgttttagttttcggaggaattgggattataggcgttcgttattacgttcggttgattattcgtatttttggtagagatggggttttattatgttggttaggttagtttcgaatttttgattttaagtgatttatttgtttcggtttttaaatataatgatttgttttaaggttgtaagtatttttattaggtatttatggggtgagtagggtggggtagatgtgtttcggaatggggtatagcggataggaagtaacggtttataataacgtgaacgtttttgacgtgtagcgggagttttagaaagcgtggtcgaatttgtagtttttaataaatggttcgtttttaaattttagttttaattttttttgagcgataggggtatgttattagtacggggggaaatgagatataagaaacgttcgaaagggaaaaataaggttgggttgttttttttttttggggttaagatagaggtatagaaggtttaggtttgggaggttggattattttcggttggatgttgagtcgggtgggagtttaaatagtagggggtttataggaggtcggtttaggtagtttcgcgtttatttattaggttaggtttaggtacgtttttagcgatagtaggtttaggtacgttcgggggtttgtttagttttcgttttcgttgtttcgggttacgggggttttttcgttttcgtttcgtttttcgggtttcgtagtaggggtttttttgggtttcgatttttttcggttttttattttagatatgtttggagattttaggacgataagtttagggtagtttttttattagggggagtaggacgtggtcgttttggcgttcgtgggaattttgggcggtgatcgcgtttttttatagatttggtatcgtttagagtttagtttttttttttttttcggtattttcgttgttttattgagttttttagttgttagttttatagtttttttaggagaggtgggcggcgattttaatttatagcgttttttattgcgatattgttttaaattcgaggaaatttaaattttcgggcgcgcgtaggtcgacgggattcgaggaggaggggtaggacgaaggggtcgcgcgcgttacgtcgggcgcgtcgtcgttgttcgagttcggtattggtgggaacgcggcgcgtttttgaggtttagttacgtttcgttcgcggggtaggcgggtatttttacgcgcgcgggtatgagtcgtggtaggagtgcgcggcggtagcggtggtcgttttttggggtttggggtgtgtttatttgtataagcgggcgcgcgtcgttcgggttgggtggattcggcgggatttgattgtttcgttgtttagaggcggagaagaagaggtagcgagtggacgtgattgttttatttcgggtaaaagggatagaattagaggtggggagtttgggtagtcggcgattcgcgaagatttgaggtgtcgtagcggtattcggagtagcgtcgggtttttttcggggtgtagtcgtcgtcgggggaagggcgttataggtcgggaagattttttttttttgtgtttagtagtggggtttatcggagggcggttcgtgggtcgggttttatcgcggcgtttcgggattgtggggttaggttgcgttgggtggacgtttatttcgttaattttcggaggtttttgggggttttcgtgcgtttcggggttgtagagatttaggggaggcgtttgtgaggttcggatttgtttcggggcgaagggtatgtggcgagatagagttttgtatttttaattttcggtggaaaatttttgttgtcgtttttttttatcggtttggagttttttagttttgtttcggtagtgtcgttttttttattaagatttaggcgtaaaggtttgggtaagttgattttttcgttttttttttcgagttaggttttttggaggtttggtagttgattttagggattgagaatttgaggatatggaatatttgataattattttgtttttgtattaggaagagaaattttgtaatgaggaagtagtaaatttggggttttcgtggataaacgtgcgttgttttttgttttacgtttatgaagagttttggttttttattttgttgtgggttataaaaggttttgagatttagtttagataagttgtgtagttttaaaacgtatttaagatttgtatattttagtttaataggattaggtgaaattggaaattagttttagaaaattagagtgttttatttgtttagttattggatattatttaaaaaatttatttatttttgtttttttatatcgaattttattattataaattaaggaatattttatgtttaagaggataaaaacgttattaatattttaaaaaatgagagttttgattcgaattaataattttttattagttttgtgtttttgttgggtattttgtaagttttgataagtataggtaaatgttttacgttcgtttttgtttttttaagtgttatatttggtgattttaaaaatagttattgaagtttgataattattgtttttttttgtgagttttaagttatttgtgttttgtttttgtatttcgggtatttatatttttatttttttttttttttttttttttgagtagattgtgaattattttaggtaaatgatttaattttttttgtagttttggtgtttgatatatagggaggggtataaatgtgtattgaatgaatgaattgataaattcgtttagatttttttattttatatattgtgtaaagttttgttaatgttttgaaaatttgtagatattgtgaattgggttttatgtttatggaaaaatttgtattatatttgaaataaagttgttagaaacgttaagtattttattataaa

SEQ ID NO: 2 - DNA, 6536 bp, Artificial Sequence
  chemically treated genomic DNA (Homo sapiens)
tttatagtaaaatatttgacgtttttagtaattttattttaaatataatgtaaatttttttatgggtataaaatttagtttataatatttgtaagtttttaaaatattaatagaattttatataatgtatagagtgaaagagtttaaacgggtttattaatttatttatttaatatatatttgtgtttttttttatatgttagatattaagattatagaaaagattgagttatttgtttgaaataatttatagtttatttaaagaagaaaaagagagagagagtgggaatgtgaatgttcgaagtgtaaaaatagagtataagtaatttggagtttatagaagggggtaataattattaagttttaatgattgtttttgaagttattaaatgtagtatttggaaaaatagggacggacgtagggtatttgtttatgtttgttaaggtttataaaatgtttagtaggggtataaaattgataaaaagttattgattcgaattaaaatttttattttttaaaatgttaataacgtttttgtttttttaaatataaaatgttttttaatttatagtaatgaaattcgatgtgaaaaaataagaatgaatgaattttttaggtgatgtttaatagttaagtaaataagatattttggttttttgaaattaatttttaattttatttagttttgttaaattaaaatatgtaaattttaaatacgttttaaaattgtataatttatttgaattaagttttaaaattttttgtaatttataataaaatggaaagttaaaattttttatggacgtaaaatagaaaatagcgtacgtttatttacgaaaattttaagtttattatttttttattatagaatttttttttttggtataggagtaggatggttattaaatattttatgtttttaaatttttagtttttgaaattagttattaagtttttaaagaatttggttcggggagaaaagcgaggaggttaatttatttaagtttttgcgtttaggttttagtggggagggcggtattgtcgggataagattgggagattttaggtcggtggagggaaacggtaataggagttttttatcgggaattaggggtgtagggttttgtttcgttatatatttttcgtttcggggtaggttcgggttttataggcgttttttttggatttttgtagtttcggggcgtacgaagatttttagggattttcgaaggttggcgaggtgggcgtttatttaacgtagtttgattttatagtttcggagcgtcgcggtgaggttcggtttacgggtcgtttttcggtggattttattattggatataaagggaggaggttttttcggtttgtggcgtttttttttcgacggcggttgtatttcggagggagttcggcgttatttcggatgtcgttgcggtattttaagttttcgcgggtcgtcgattgtttagattttttatttttggttttattttttttgttcgggatagagtagttacgtttattcgttattttttttttttcgtttttggatagcggagtagttaaatttcgtcggatttatttagttcggacggcgcgcgttcgtttatgtaaataaatatattttaagttttaaggggcggttatcgttgtcgtcgcgtatttttgttacggtttatgttcgcgcgcgtagaagtgttcgtttatttcgcggacggggcgtggttaagttttagggacgcgtcgcgtttttattaatgtcggattcgggtagcggcggcgcgttcgacgtggcgcgcgcgattttttcgttttgtttttttttttcgggtttcgtcggtttgcgcgcgttcgggagtttgaattttttcggatttggagtaatatcgtagtggaaggcgttgtgggttgaggtcgtcgtttattttttttaggggaattatggagttggtagttgaaagatttagtgaagtaacgaggatgtcggggagagggaaggggttgggttttgggcggtgttaagtttgtgagggggcgcggttatcgtttagggtttttacgaacgttaaggcggttacgttttgttttttttggtgaagaagttgttttgggtttgtcgttttagggtttttagatatgtttgaggtgaagagtcggaagaagtcggggtttaagggagtttttgttgcggagttcgggaagcggagcgagggcgggaagattttcgtggttcggagtagcggaggcgggggttgggtagattttcgaacgtgtttgagtttgttgtcgttggggacgtgtttgggtttggtttggtaagtggacgcgaggttgtttgggtcggttttttgtgggttttttgttgtttgggtttttattcggtttaatatttagtcggaggtgatttaattttttagatttgggttttttgtgtttttgttttgattttaaaggaaggaaatagtttagttttgtttttttttttcgggcgttttttgtattttattttttttcgtgttggtagtatgtttttatcgtttagaaggagttgaggttaaggtttgggaacgagttatttgttaagagttgtagattcggttacgttttttgaagttttcgttatacgttagaagcgtttacgttgttataaatcgttattttttgttcgttgtgttttatttcgggatatatttgttttattttatttattttataaatatttaatggaaatatttgtaattttaaaatagattattatgtttggagatcgaggtaggtggattatttgaggttaggagttcgagattagtttggttaatatggtgaaattttatttttattaaaaatacgaataattagtcgggcgtggtggcgggcgtttgtagttttagttttttcggaggttgaggtaggagaatcgtttgaattcgggaggcggaggttgttatgagttaagatcgtattattgtattttagtttgggcgatcgagcgagatttcgttttaaaaaaaaaaaaaaaagaaaattatattattatgtttttaaaggagtaaacgttatagtagtagagtttggaggagtgtttatattttgattatcgtgtatgtattatgaatttaaggttttttattaagtaagttatagattgaatatggtaaagttataaaaatatagtatttgtgtttatttaaaattaattagttgtagttttaaaattaggtaaatggcgatatattggtgttattaggaaaaatgaatattagaaataattttaaaattaattcgtaaaaaaagaaaaaagaaaaaaattaatttgtgaattttatttttttagtttttttttttttggcgggaggagggaatagtttattttattttaataagattggtattttaatagaatttttttttattttttatttatgtgtaaagttatttagtaagattgttgttaattttttagagtgatagaattttagaagagattttggatatttagatattttttatgttattatatatggaattatattttattggtgatttattttaaatagtgtattttttagagttaaaagatttgttacggttgggcgcggtggtttatatttgtaattttagtattttgggaggtcgaggtgggtagattatgaggttaggagtttaagattaggttggttaatatggtgaaattttgtttttataaaaaatataaaaattagttaggtttggtggtataaatttgtaattttagttatttaggaggttgaggtaggagaattattcgaaatggggaggtggaggttgtagtgagttgggatcgtgttattgtattttagtttgggtaatagagcgagattttattttaaaaaataaataaataaaattttgttataataaagtgattaaacgttttttttaaaaataatagaattgttagtttgtcggtagtggtttatgtttgtatttttagtattttgggaggttaaggtgggtggattatttgaggttaggagtttgagattagtttggttaatatagtaaaattttgtgtttattaaaaatataaaaaagttaggtatggtggtatgtttttgtaattttagttatttaggaggttgaggtaggaaaattatttgaatttaagaggcggaggttgtagtgagtcgaaatcgtgttattgtattttagtttgtaggatggagtaaaatttttttttaaaaaaaaaaaaaaaaaaagtagatagtattatttattttattaatacggaatatgttaattttgatttgaaaggaataaatgtattgaatttattgttttaaataaacggtttttatgttttaaaatgtttgattttttttaagtaaattgaaaaaaaaatttttttgggttaggtgtagtggtttgcgtttgtaattttagtattttgggaggtcgaggtaggcgaattatttgaggttaggaatttgagattagtttgtttaatatggtgaaattttatttttattaaaaatataaaaattagttgggtttggtgtaattttagttatttagaggttgaggtaggagaattatttgaatttgggaggtggaggttgtagtgagttaagatttgttattgtattttagtttggataatagagcgagatttcgtttaaataaataagtaattttttgtgttttgggaaagttagttattattttgggataagttttaatagaaaattaaattttatgggaataaaattttttttatattaggaatttgttgttagtgatttttgtattatattgtaatgaatgtattatatttattaggaagatttaatttgaattatgtttgtaaaatgataatataatgttatattaaaaataattttgggggttagatttagtggtttatgtttataattttaatattttgggaaattgaggcgagagaattgtttgaggttaggagtttgaaattagtttgggaaatatagtgagatcgtgtttacgaaaaatttttaaatattagttaagtgtggtggtattcgttgtagttttaggtatttgggaggttgaggtgagaagatagtttgagtttgggaagttaaagttgtagtaatttatgattatattattgtgttttagtttgagagatagagtaagattttgtttttttaaaatgtatgtattatatgtgttttttatgggtagattttataattattatttaaatagttgttttttagttgtttttgtgaaattttttgttgtaaaaattgaagtaaatgtattttggttgttgtttattgtaaaatatttatttatagtaaattttgaaataaaaatatatttttataagatatttgtaaatattttttagataaaaagtaagtatttggtattttaaaatatttaaaagtttattagaattttgataaagttattgagatttttattattaaaatacgtaatttagtatttaaaagtcggtttattaaatttttattaaatgtttttcgtattgatacggttttggtggttaaaatataagtgtatatgtgtgtttgtttgtgtatttttaaatattgtttatttttattttttatttgattaagttggagggaaaaaatttgaatttttttattgtttaagaaggattttaaggaattatattatattattgtttttagattattttttatgtggaaagaaaagagaaataatatataagaaatttaaaagtgtgttgttttaatattttttttttgttaaataaaggtttgataggttaggtgtggtggtttttatttgtaattttagtattttgggaggtcgagttgggcggattttgagtttaggagtttaagattagtttgggtaatatggtaaaattttgtttttataaaaaatataaaaaattagttaggtatggtggcgtatgtttgtagttttagttatttggggggttgaggttggaggattgtttgagtttcggaatttgaggttttagtgagttttgattgtattatagtatttagtttgggtgataaagtgagattttgtaaaaaaaaaaaggtttgatatattttatgttattttgataataaatattggagataagttgtttaaatttatatggtttgagtgttagtttgtatagtttttttttaaatttttatagaaattttttaggtaagaattgaggtgattttatttttagaaagttaaaaagttgttaaattattaaataagatataaaatttgttatttatgtttatttaattatatagaaatttaattagttggaatttttattgtgaaaattttgttttttatggaaattttaatagattttttaattgtttttttgttttgttttgttttgttttgttttgttttgttttgagagatggagttttgtttttgttgtttaggttggagtgtagtggcgtaattttagtttatcgtaatttttatttttattttttaggtttaagtaatttttttgttttagtttttcgagtagttgggattataggtgtgcgtt

SEQ ID NO: 3 - DNA, 6681 bp, Artificial Sequence
  chemically treated genomic DNA (Homo sapiens)
gagaagtttagggaatgggatatttttaagaggaagtgtgttttagtgttagatgtaaatatttttattggttttagtaaaaaagttattggtgttattaatatcgaaagtagttttaagtgatgttgatttaatgagtaaatgggagagggaaaatggagatattaattatatatatatgtttagtttgtttggttgtgaagagaaggggtgatatagggtagttgttagagtggaaagtgtggttgaaagaggattttttttttttttttttgagatagagttttattttgttatttaggttggagtgtagtggtgtagtttcggtttattgtaatttttatttttcgggtttaagcgatttttttgttttagttttttgagtagttgggattataggtgtatgttattatattcggttaattttttgtattttttttagtagagacggggttttatcgtgttagttaggatggttttagttttttgatttcgtgatttattcgttttagttttttgaagtgttgggattataggtatgagttattatattcggtcgaaagagaattttaaaaattttttttatttgaaagttgagatagatttaagtatggttatgtgaaaggaaaaaggttagtcgagagtgataggaatgagagttgaagtaatgaggggatgggattaagaataagatttttgaggtagtaggatagtgtaggattttataagggggtaagtttttaattgagatagtaagtaggttgtgagttaaaacggtttggatatgagaacgtgagaaggtttttgtttaatgatgttttttttttttgagaaatagaaggtaaagtaattgattgaaaatgagatggagtgtagtggagaaatttgaggaaggtgttgaaggtttagaagaggtgtatagggtatgggttagggagttgagtttattgttaagggatggtagaggagttttaagtgatgttggttttagtttgtagggttgtatttaggtgttggaaatgattaggatagaggttgaagtgatttagggttgatattttggtatatttgtgtatatttattgtatagttgttgtttaaatttttataaatatatgttttgttggagtgtagtggtgtgattttggtttattgtaatttttatttttcgggtttaagtgatttttttgttttagttttttgagtagttggaaatataggtgcgtgttattacgttcgatggtttttttttttggatttttagtagagatagggttttattatgttggttagtttggtttcgaatttttgattttaagttatttgttttttttggttttttaaagtgttgggattataggcgtgagttattacgtttgatttaaagtttttttaggataagatttgtgtaaggggtttgtaaatttaaatggaggtgatataaatgagaaaaatttttagtgtttttttttttttttttttttttttttttgagatagggttttgttttgttatttagtttggagtgtagttatgtagttttatattgtaagttttgttttatgggtttaagtgaattttttgttttagttttttaagtagttgggattataggtaggtgttattatgtttggttaatttttgagtttttttgtagagatggtgttttgttaagttatttagtttgaggttggttttaaatatttgggtttaagtaatttatttattttagttttttaaagtgttgggattataggagtgagttatggtatgaggttttgtggggtgttttttttaaatgaaagtatattttgtttacgtatttgatatgaaggaatattttttttttttataaagataaaaattattttattttttttaaaatatatgttttttttttttattttttatttttgttatttttgatggatatatgtgttatattgattttatttttttataattttgttgtaagaaaaataatagtgttagtttaatgataaatagtaatagtttgttattgttagattgttattgttagtggagattattagaatagttagttttagtgttagggaattaaagagaatatgttttttttttaaagggtatagttgttgtttagttttagttgattgttgttttgtaggattataggtttagtgttgttagattttttgatgttttaagagaagtttggaatttagaatgtgatgggaagttttttatatttaaatatgttggtaattaatggtaagatttaaaaatattgtggtttaagaaaaaaatggatttggaaattggattaaatttaaatgaggtatgtagattaatttatagtatggtataatgtgaattttttggtttttttaattgtattgtaattaggtaagatgttagttttggggaagttaagtgtagagtatgtagaaattattatttttgtaagttttttttaagtataaataaattttaaaataaaaataaaaatttagtaaagaattataatgtaattttatgtaagttaaatataatatgttttttagtttgaaatttttgggttttattttattttattttatttttgagatagagttttgttgtgttatttaggttggagtgtagtggtattatttcggtttattgtaatttttattttttaggtttatatgatttttttgttttagttttcggagtagttgggattataggcgcgtattattatatttagttaatttttgtatttttagtagagatgggggttttattattttggttaggttggttttgaatttttgattttaagtgatttatttgttttggttttttaaaatgttgggattataggcgtgagttattgtattaggtagaggtttttgttttttatttttttttggtttttatagtgtttagtaaagtatttgatatatggtaaacgattagtaattattagtattttattttggagaaaatgattttttaaaaagttattgtgttttatttatgagtcgtttgagttttaaaattgtttttttgtttgtttttgaataggtttataaaggaggaaaacgattttttttagattttttttttagttttttttataaattaaaatattttaaaatggagatttaaaatttttaaagggatttagtttaatttcgggaggtagttttgtgtatgggtaaataaattaagtattaattggtgttttattatttaaagaatgttaattttataaatatgatcgagttatataaggtatattataatgagtttgattttgaatttgatttgtggaaataaaggaaaagtgattttagttggggtatattgttaaagtattttttttagagttggttaggtagttttttattggtatatttttttattatgtagaatagaaatagtatttgtgtttgggaaagattttaaaatgagtgatagttatttggaataaagagttaataattaatttattgtaaattaaagaaatatgtagatgaaagttttgatatattaaaatatttttatagtgataaagaaaaattaagaataaagttttttgatatgtgtaataaatttagaggaagtaaaaagataaatgtgatgattggttaagaaattatttagttatttataaggttattgatattttaaacgtttaaaagtttgtttaaatgggttgttatcgttgagaatgatgaggatgagaatgatggttgaaggttatattttaggaaatgaagaaatttagaaaattaatataaagatagtgatgaatataaagaagatttttataataatgtgtaaaatttttggttagggaaaggaatattgaagttagatataattatttatttttgagggaaaataattgttggtaatgagatgtgatgttttttttgttttttggaaataaagtattgaagtttgtagttgaaaagtttaacgtttgtgagatttaggaaattatgtttgtaaatttttggtaaaaaaaaaaaaaaaaaaaaaaaaaagttatagtgatttgtttattggttattgttagtattatcgatttagaatttttttattaatggttagtaaattataattgagaaattttgaattttgataaggtttttgttgttgaaatggtaaatttattattttttttgttatgataaattttggtttaaggtatgttatttatgaaataatttttgattaaaattaaattgatgtaatttgattatttattttagtttatagatggtatttggtaatttttgattgttttaaaaaataaatttattattagagtagatttgatgttggttttagaaatatttagaaaaataaaagtttaaaaatgtttttaggaggtgataagttgaataattttataatgttagttttttgagggggataaaaaatttaaaatttttgaaaggttttattttatagttatatttaaattattttaagaaaatttttaataaagggaatgaaatatatattatgattttgtttttttaaaagtaatttgaatatagtaatgaagtttagttttgttattggtagtttgggtagagtttttttttgtagtatttgttgtttattataattatagaggatatttttatgttttagttaagtatattattagaataaaaaaatttaatattgagttgttttaatagtatgaaattgagtttaaaagattaaatgaataaatatattaatttttgattatttattttaaatagaatatttaattgtgtaagatttaatagtattattatatttaagtaattatatttttgatgatttatgggaaataattattatttaattaatattgaaattaggttttaagatgtgttagttagttttgttattagtaaatttttttatttggagagaaattttagattgttttgttttttttattagaaggattgtagaaagaaaaaaatgattaattggagaaaaattggggatatattatattttattgaatttaaaatgtttttagttgtaaattttattattattttacgtatttttaagaaataaaagtgtttttaattaaaatatgatgttattaattatgaaatattttttgataatagaagttttaaaatagttattttagaattagtgaaatatggtaatgtattattttttttttttgagttaggttttgtgttttttttttttggttattaaattttataatttttaaaaagtaaaataaatatattttgaatatttttgttgtgaaatatttgatagtagagttttttattatgaaaagaagttttatgagttatatattatatttttgggttgattgaatgttattgaaatattttagtagtttggagaagttgatttatttgtggagatgtttgttattaaatggtattttgatggtttaatatatattatttttttgtgaagggttttaatttttaatatagtttattttgtagtattatgtttatattgtatgtataaagattatataaaggtgtaattgtgtattttttttttaaaatgtattagtataggatttagaatttttatgttgaaattttaaatgtatagaaataaaaataataaaaaattttttattttggttttttagtttagtattaaaattgataaaagtaaagttatgtataaaattatttttttagagaaaggttagtttttttttttttttatttattttattatgaatatagtagaaaatagtatatttttattaaatttgatgaaaagcgttaatacgtttgaattgaaatacgatttgttatgtgaattgtatcgaatgtttacgtattttattttttttgttggggtttttgttttagaaaggagttttgttcgtgttggtttttattatattggtgtgaatgataaggttaaatgtttttgttgtggtttgatgttggataattggaaaagaggagatagttttattgaaaagtataaaaagttgtattttagttgtagattcgtttagagtttaaatttcgttaataatttggaagttattttttagtttatttttttttttttagtaataaattttatatatttattattttcgggtatagaaaatagtggatattttcgtggtttttatttaaattttttattaaattttgtaaattttagagtaaattaagatttttttgttttgatgagaagtttttattattgtgtaatgaataacgaaaatgttagattatttattttttagatatggttattgatttttttgtcgttaatagatttggtaaaagtaggtttttattatataggatttggagatagagtggtttgttttgtttgtggtggaaaattgagtaattgggaatcgaaggataatgttatgttagaatatttgagatatttttttaaatgtttatttatagaaaattagttttaagatattttaagatatatagtttttaatttgagtatgtagatatatgtagttcgttttaaaatattttttaattggttttttagtgttttagttaattttgagtagtttgtaagtgcgggtttttattatgtgggtaagaaattgaatttgttaattaaaaaaaatatattttattttatatattttagtgggtaaattatgtgtatttataagttttggtttaaaattaattttagg

SEQ ID NO: 4 - DNA, 6681 bp, Artificial Sequence
  chemically treated genomic DNA (Homo sapiens)
tttaaaattaattttagattaaaatttatgaatatatataatttgtttattaaaatgtataaaatgaaatatattttttttaattagtagatttagttttttatttatataataaaaattcgtatttgtaagttgtttaggattaattagaatattagagggttagttaaagaatgttttaaagcgggttgtatgtgtttgtatgtttagattagaaattgtgtattttgaagtgttttgaagttgattttttataaatgggtatttgggaaaatgttttaggtgttttgatatagtattatttttcggtttttaattgtttaattttttattataggtaaagtaagttattttgtttttaggttttatgtagtaaaagtttgtttttgttagatttgttggcgatagaaaagttaatggttatgtttgaaaagtaagtaatttggtattttcgttatttattgtatagtggtaggaattttttattaaggtagaaaaattttgatttgttttggagtttataggatttgatggagagtttgaataagagttacggaaatatttattgttttttgtattcggaagtaatgagtgtgtggaatttgttattgaagaaggaaaagtaggttgagaggtagtttttaagttgttaacggaatttagattttgaacgaatttgtagttaggatataattttttatgttttttagtaggattgtttttttttttttagttatttagtattaggttataatagaagtatttgattttgttatttatattagtgtaatagaaattagtacgagtaagatttttttttgagataggaattttagtaggaaaagtggaatacgtagatattcggtatagtttatatgataagtcgtattttagtttaaacgtgttggcgttttttattaaatttgataagaatatgttgttttttattatgtttataatgaaatgaatggggaagaaaagggattagtttttttttagggaggtagttttgtgtatggttttgtttttattagttttaatattaggttgaaaagttaaaatgaaaaattttttattatttttatttttatgtatttagagttttaatatggagattttaaattttatattgatatattttaaggaagaaatatataattgtatttttgtataatttttatatatataatgtaaatatgatgttatagagtaagttgtgttgaaaattaaaattttttatagaagagtgatgtgtattaagttattaggatgttatttaatggtaggtatttttataggtaggttaatttttttaggttattagaatgttttagtggtatttaattaatttaaagatgtaatgtgtgatttatgaagtttttttttatggtggaaagttttgttgttaagtgttttatagtaaaaatatttagaatatgtttattttgttttttggaaattgtgaaatttagtggttaggaaaaaaaagtataagatttaatttaaaggaggaaaataatatattattatattttattgattttaagatggttattttaaaatttttgttattaagaagtattttataattaatgatattatattttaattagaagtatttttattttttagaggtacgtaaaataatggtaagatttataattgaagatattttgaatttagtgaaatatgatatatttttaatttttttttaattagttatttttttttttttataatttttttaataaggagaataaaataatttaaaatttttttttaaataaagagatttattagtaataggattggttaatatattttaaaatttggttttaatattaattaaataatagttattttttatagattattaggaatatgattgtttaagtataatgatattattagattttatataattaaatattttatttaaaataaataattagagattaatgtgtttgtttatttggttttttggatttagttttatgttgttgaagtaatttaatgttaagtttttttattttaatagtatatttggttagaatatggaaatgttttttgtaattatggtagataataggtgttgtaaaaagagattttgtttaaattattaataataaaattgaattttattgttatatttaggttatttttggaaaaatagaattatgatatatattttattttttttgttaaaaatttttttaagataatttagatatggttgtaaaataagattttttaaagattttaaattttttgttttttttaaagaattaatattgtagagttatttaatttattattttttgaaaatatttttgaatttttgtttttttaaatgtttttgaagttaatattaaatttattttgatagtggatttattttttaaaatagttaaaagttattagatgttatttgtaggttaagatggataattaaattgtattaatttagttttggttagaaattattttatggatagtatattttgaattagaatttattatgataaaaaaaataataaatttattattttaatagtagagattttgttaaaatttagaattttttaattatgatttattagttattagtaaagaggttttgagtcgataatattagtaatgattaataagtaagttattgtggtttttttttttttttttttttttttttattaggggtttgtaagtatggttttttggattttatagacgttgggttttttaattgtaaattttaatgttttgtttttagggggtaggagaaatattatattttattattaataattatttttttttaaaggtaagtaattgtatttaattttaatatttttttttttggttaaaaattttatatattgttataaaaattttttttgtatttattattgtttttatattaattttttaagtttttttattttttaaaatgtaatttttaattattatttttatttttattatttttagcggtaatagtttatttaaataaatttttggacgtttaaaatattagtggttttgtaaataattggataattttttgattaattattatatttatttttttattttttttaaatttgttgtatatattaaaaagttttgtttttgatttttttttgttattgtagaagtattttaatgtgttaaaatttttatttgtatgtttttttaatttgtagtggattgattattagttttttgttttaaataattgttatttattttaaaattttttttaaatataggtattatttttattttatataatgggagaatgtgttagtaggagattgtttggttaattttgaaaaaaatgttttaataatatgttttagttagaattattttttttttatttttataaattaaatttaaaattaaatttattatggtatattttatataattcgattatgtttataaaattagtattttttggatagtaaaatattagttaatatttaatttgtttatttatgtataaaattatttttcgagattagattaagtttttttaaggattttaggtttttattttgagatgttttgatttatagaagaaattgaaaaaaaaatttagaagaagtcgttttttttttttgtaaatttgtttaaaaataaataaaaagatagttttaaaatttaaacgatttatggatggaatataatgattttttaaaaaattattttttttaaaatagagtattagtaattattgatcgtttattatgtattaggtgttttattaggtattgtagaggttaaaaagagataaaaaatagaggtttttgtttggtgtagtggtttacgtttgtaattttagtattttgggaggttaagataagtggattatttgaggttaggagtttaaaattagtttggttaaaatggtgaaatttttatttttattaaaaatataaaaattagttgggtgtggtggtacgcgtttgtaattttagttatttcggaggttgaggtaggagaattatgtgagtttgggaggtggaggttgtagtgggtcgaaatagtgttattatattttagtttgggtgatatagtaagattttgttttaaaaataaaataaaataaaataaaatttagaggttttaaattggaagatatattatgtttggtttatatagaattgtattatagttttttattaagtttttatttttattttgaaatttatttatatttagagaaagtttataaaaataatagtttttgtatattttgtatttagtttttttaaagttaatattttatttaattatagtgtaattaaagaaattagaaaatttatattgtattatgttgtagattaatttgtatgttttatttgaatttaatttagtttttaaatttattttttttttggattatagtatttttaaattttattattaattgttaatatgtttaaatgtaagagattttttattatattttagattttaagttttttttgaaatattaaaagatttagtaatattgggtttatagttttgtagggtagtaattagttaaagttgagtagtagttgtgttttttagagagggaatatgttttttttgattttttgatattgggattgattgttttggtagtttttattaatagtaatagtttagtaataatagattgttgttatttgttattgaattggtattattgttttttttatagtagaattatgagaaagtgaaattaatgtaatatatgtgtttattaaaagtaataaaaatgaaaagtagagaaaaaggatatatgttttgagaaaaataggataatttttgtttttgtggaaaggaaggatatttttttatattaaatacgtaaatagagtatgtttttatttaaaagagatattttataaggttttatgttatggtttatttttgtaattttagtattttgggaggttgaggtagatggattgtttgagtttaggtgtttgagattagttttaaattgggtgatttggtaaaatattatttttataaagaaatttaaaaattagttagatatggtggtatttgtttgtggttttagttatttgagaggttgaggtaggaggtttatttgagtttatgaggtagagtttgtagtgtgagattgtataattgtattttaaattgggtgatagagtaagattttgttttaaaaaaagagagagagagagaaagagagatattgagagttttttttatttatattatttttatttgagtttgtaaattttttatataaattttattttaaagaagttttaggttaggcgtggtggtttacgtttgtaattttagtattttgggaggttaaggaaagtagataatttgagattaggagttcgagattaggttggttaatatggtgaaattttgtttttattaaaaatttaaaaaaaaaaattatcgggcgtggtggtacgtatttgtatttttagttatttaggagattgaagtaggagaattatttgaattcgggaggtgaaggttgtagtaagttaagattatattattgtattttagtaaggtatatatttgtggaaatttaggtaataattatataataaatatatataaatatgttaagatgttaattttagattattttaatttttgttttaattatttttaatatttagatgtaattttgtagattgggattagtattatttaagatttttttgttattttttagtaataggtttagttttttagtttatgttttatgtattttttttaaatttttaatattttttttaaatttttttattgtattttattttatttttagttaattattttgttttttgttttttaaagaaaagagatattattgagtaggaatttttttacgtttttatatttaagtcgttttggtttataatttatttgttgttttagttaaagatttgtttttttatgggattttatattgttttattgttttagaaattttgtttttaattttatttttttattgttttaatttttatttttgttattttcgattggtttttttttttttatataattatgtttaaatttattttaatttttaaatgaaagaaatttttaaaattttttttcggtcgggtgtggtggtttatgtttgtaattttagtattttaggaggttgaggcgagtggattacgaggttaggagattgagattattttggttaatacggtgaaatttcgtttttattaaaaaaaatataaaaaattagtcgggtgtggtggtatgtatttgtagttttagttgtttaggaggttgaggtaggagaatcgtttgaattcgggaggtggaggttgtagtaagtcgagattgtattattgtattttagtttgggtgatagagtgagattttgttttaaaaaaaaaaaaaaaaaatttttttttaattatattttttattttagtaattattttgtattattttttttttttatagttaagtaaattggatatgtgtgtatggttaatgtttttatttttttttttttatttatttattaagttagtattatttaaaattgttttcggtgttaataatattaatggtttttttgttaaaattaatggaaatgtttgtatttgatattgggatatatttttttttagaaatgttttattttttgggtttttt

SEQ ID NO: 5 - DNA, 7049 bp, Artificial Sequence
  chemically treated genomic DNA (Homo sapiens)
ggatttaaagatattttagaaatttttgaggtagttttttttattataggttagaggtttaggaggaaagaattattttaggggttaggtatagggtattgtttttttgtttagttttaggattttattttttgtattttggttattttagttttatttatggtttatagggttataggtatagtttaagttgttattttggaaagtgtaaattattgtaagttttggtagtttttatatggtgttaaggttgtaggtgtataaaatgtaagagtaaaggaggtttggtaatttttatttagattttagaggatatatggaaaagtttagatgtttaggtagaagtttgtagtagggatagagtttttatagagaaatgttattagggtagtattgagaggaaatgtggggtttgagattttatagagtttttagtaggatattgtttagtggagttgtaggaagagggttacgaatttttagatttgagaatggtaaagttatagtagtttgtaagtttagtatgaaaaagttataggaatttaattttagtttattagagtagttataaattgtattttgtaaagttataagggtaaagttgtttaaggttttgggaatttatattttgtattagtatgtttaggatataggatatggaggtaagggaaattattttggaatttaaagtttaatgtttattttgttgggttttagatttgtatggggttaattgttttttttttttggttgattttttttttttggaatagagtgtttatttaatgtttttattattattgtattttgggtgtaaataatttgttttgattttataggtttgtaggtaaaaagaatttaatttgagatttagatgtgattttggatttttgattgaattgatgttggaatgaggtaaggttttgggggattgttagaaaggatgaatgtattttataatgtgagaaggatatgagatttgaggggttagaaggggaatgatatggtttgggtgtttgattttttttaattttatgttgaaatgtaatttttaattttggaggtggggttaagtgggagatattggattatgggggtagatttttgatgaatggtattatttttatgatgagtgggtttttattttgttagtttatttgagatttggttatttttaaaagggtatggtatttttttttttttttttttgtttttgttttttttatgtgatatgttggatttcgattgttttttaatatgattgtaatttttttgaggttttattagaagtagatgttagtattatgtttttttaaagtttgttaaattatgagataattaaatttttttttattgtaaattatttagtttcggggatttttttatagtaatgtaagaatagattaatgtatatgttaagtgaatttttatttagaatagattaaaaaaattagatattaaaattatttgattaagatttgttttttaaggtggttgaataagaagagtttcggtttgtagtttttagtatgatcgatgtagaagatgggtgatttttgtatttttaattgaggtatttggtttatttaattgggattggttggatagtgggtgtagtttacggagggcgagttaaagtagggtggggtattgttttattcgggaagtacgagagattgggggattttttttttttagttaagggaagttaggatagaatgtatttggaaaaataggatattttcgtttaaatattgtattttttttaaggttttagtaattggtagataaggagatttttttttgtgtttggtttagtgggttttatgtttatggagttttgtttattgttagtatagtagattgagattaaatagtgaggtggtagtttggttgggggaggggtatttgttattgttgaggtttgagtaggtaaataaattagttaagaagttcgaattgggtggagtttattgtagattagtaaggtttattgtttttatagattttatatttgtgggtagggtatagttgaataaaagatagtagatagtttttgtagatttaaatgtttttgtttgatagttttgaagagagtggtgatttttttagtatggtgtttgagttttgagaaagtatagattatttttttaagtgggtttttgtgtagtttaattgggaggtattttttagtaggggataatagatattttatataggtgggtgtttttttgggatgaagtttttagaggaaggattagggagtaatatttgttattttttaatatttgttgttttgtagttttcgttggtgatatttaggtaaatagggtgtggagtggatttttagtaaattttaatagatttgtagttgagggatttgattattagaaggaaaattaatatatagaaaggaatagtattaatattaataaaaaggatatttatattaaaattttatttgtagattattaatattaaagattaaaggtaaagggatggaggaagatttattatgtaaatggaaaataaaaaaagtaggggttgtaattttagtttttgaaataatagattttaaagtaataaagattaaaagagataaagaaggttattatataatggtaaagggatgaatttaataagaagagttaattattttaaatatatatgtatttaatataggagtatttagatttataaagtaaatttttagagatttataaagagatttagattttttatataataataatgggagattttaatattttattgttaatattagaaagttttatgagatagaaagttaataaggatatttaggaagtgaatttagttttgtattaggtagatttaatagatattaataggattttttattttagattaatagaatatatattttttttagtattatattatatttattgaaaattgattgcgtagttggaagtaaagtattttttagtaaatgtaaaagaatagaaattataaattgttttttagattatagtgtaattaaattagaatttaggattaagaaatttatttaaaattatttaaattatatggaaattgaataatttgtttttgaatgattattgggtatataataaaatgaaggtagaaataaagatgttttttgaaattaaagagaataaagatataatatattagaatttttgggatatatttaaagtagtgtgtagagggaaatttatagtattaaatgtttataagagaaagtaggaaagatttaaaattgatattttaatattatagttaaaagaattagagaaggaagagaaaatatatttaaaagttagtagaaggtaagaaataattaagattagagtagaattgaaggagatagagatataaaaaaatttttaaaaaaattaatgaatttaggagttggttttttgaaaatattaataaaattgatagattattagtaagattaataaagaagaaaagagagaagaattaaatagatgtaataaaaaatgataaaggggatattattatcgattttatagaaatataaattattattagagaatattataaatatttttatacgaataaattagaaaatttagaagaaatggataatatatttttttaagattaaattaggaagaattggaatttttgaatagattaatattaggttttgaaattgaggtaataattaatagtttattaattaaaaaaatttaggattagacggatttatagtcgaattttattagaggtataaagaggagttggtagtattttttttgaaattattttaattaatagaaaaagaggtaattttttttaatttattttatgaggttagtattattttaatattaaagttaggtagagatataataaaaaaagagaattgtagattaatatttttgatgattattgatttaaaaatttttaataaaatattggtaaattgaatttagtagtatattaaaaagtttatttattacgattaagatagttttatttttgggatgtaagattggtttaatatatgtaaattaataaatataatttattatataaatagaattaatgataaaaattacgattatttgaatagatgtagaaaaggttttcgataaaatttaatagttttttatgttaaatatttttaataaattaggtattgatggaacgtattttaaaataataagagttatttatgataaatttatagttaatattatattgaacgggtaaaaattggtagtattttttttgaaaattggtataagatagggatgtttttttttatcgtttttatttaatatagtgttgaaagttttggttagggtaattaggtaagagaaagaaataaagggtatttaattaggaaaagaggaagttaaattgtttttgtttgtagatgatatgattgtatattttgaaaattttatcgttttagttttaaatttttttaagttgataagtaattttagtaaagttttaggatataaaattaatgtgtaaaaattataagtatttttatatattagtaatagatagagagttaaattatgagtgaagttttatttataattgttttaaagtgaataaaatatttaggaatttaatttataaggtatgtgaaagatttttttaaggagaattataaattattgtttaatgaaataaaagaggatataaataaatggaagaatattttatgtttatggatagaaagaattaatattatgaaaatggttatgttttttaaggtaatttatagatttaatgttatttttattaagttattaatgattttttttatagaattggaaaaaattatttttaagtttatatggaattaaaaaagagttcgtattgttaagataattttaagttaaagaataaagaattttatggagtgtaattttgtgtatgaattatatttttaaaatattgaagagtttttagaaagaaggttagtagagttgattattgatattttatgttaagtagtatttttttggtagtataatattttgttaggcgtttttgataatattagaaaggataagttttattttgtgataaattgattaatgtttataatatgattgataattatagttgaatagtttttaaatgatgaataggttatttagtttttaaatgtagtgtaaaaagtgtgttgtggaaattttatggttaattaagtttatggagaaaatatttttagttgattaagaataatagtggtatataaagttaggaagaaagttaatatgatgttgtaggaaatggaaataaatataaatgatatttaataaagatagagtttatagtttttgaattttaagttaaatttatttgatattaagtattatagtaggtataggtttaataaagtttgtgggtattgattttttttaaaagttgttagttgaagtaatttagtttatttaagtaaatattatgatgataagttgtgtgaatttagtttttaaatagtgtgattatatgaaggttttaattatttttgtttattggaataaaatgagattttttgggttgttatgttaaagtgtttatagggaaagaagtttgtatataattttttattttgtggtataattagtaattggtttgttatttaggttttatagtttgtaattaaatataaataaaaggtataatttaggtattttatagttgtttagaattttgttaatataaatttttgtgaaaaattaaggagttttaatatttttagaagtgtatttattttttagggttttaagttagtattatttaagattatgaataaatagtatttaggttatttgaaagagttattataattttaaagagttgtgttttaagtagtattttggtaatttagagagatatttattttatttgaatataaattgagataaatttagtaaagaaagtgtagtaaattttatataagagtttattattgatttttttttgtggtaaaaattttagtttatgtgaagaaattttatgtgaatgttttagttattaaatagtattgttatttatttatgtataaaattgttttttaaagattttttttaggtttttcgtattaaaatattaagagtataatggaagatagtacgattttgttagattggataaatagtaataaataaaaaatgaagtatgattttttttgtgaattttatagaatgtttatatatttaatttttttcgtcggggtgtttgttttagaaaggagttttgttcgtgttggtttttattatattggtgtgaatgataaggttaaatgtttttgttgtggtttgatgttggataattggaaattaggagatagttttatttaaaagtataaatagttatattttagttgtagttttatttagaatttggttttagttagtttgggatttatttttaagaatacgtttttaatgagaaatagttttgtatatttattattttttattttggaatatagtagtttgtttagtggtttttattttagtttttttttaaatttttttaattttagagtagttgaagatatttttttatcgaggattaatttttatagttatgtaatgagtattgaagaagttagattttttatttattatatgtggttattaatttttttgttattattagaattggtaagagttggtttttattatataggatttggagatagggtagtttgttttgtttgtggtgggaagtttagtaattgggaattaaaggatgatgttatgttagaatatcggaggtatttttttaattgtttatttttggaaaattttttagaaattttgaggtttagtattttaaatttgagtatgtagatatatgtagttcgaatgagaatatttatgtattggttatttagtgttttagtttagtttgagtagtttgtaagtgttggtttttattatgtgggtaagaagtaaataattatatattttattattttattttaatttatatattagaatatacgtgtttttaatatttagtttttttttttttgaagg

SEQ ID NO: 6 - DNA, 7049 bp, Artificial Sequence
  chemically treated genomic DNA (Homo sapiens)
tttttaggaaaaaaaagattaaatattgaaaatacgtatgttttaatatgtaaattaaaataaaatgataaaatgtatagttatttgttttttatttatataataaaaattagtatttgtaagttgtttaggttgaattggaatattagatggttagtatataaatgtttttattcgagttgtatgtgtttgtatgtttagatttgaaatgttaaattttagagtttttagagaattttttaaaaatggatagttgggaaaatgttttcggtgttttgatatagtattattttttggtttttagttattgagttttttattataggtaaagtaggttattttatttttaggttttatataataaaaattagtttttgttaattttgatggtgataaaaaagttaatggttatatatggtaggtaagaaatttggtttttttagtatttattgtataattgtaggggttagttttcgatgaagagatgtttttaattgttttagaattaagagggtttggagaaaggttggagtaagaattattgaataagttattatgttttaaggtgggagataatgaatgtgtaaaattgttttttattggagacgtatttttagaggtggattttagattagttgaaattagattttgaataaagttatagttaggatatagttgtttatgtttttgaataggattgttttttagtttttagttatttagtattaggttataatagaagtatttgattttgttatttatattagtataataaaaattagtacgagtaagatttttttttgagataggtatttcggcggggaaagttgaatatgtagatattttgtagagtttataggaaaagttatattttattttttgtttgttgttgtttgtttaatttgataagatcgtgttattttttattatatttttaatgttttgatacgagggatttgggaaaagtttttgggaggtagttttgtgtatgagtaggtgatagtattgtttgatagttaaaatatttatatgaaatttttttatatgaattaagatttttattataaaaagaaattaatgatagatttttatgtagaatttattatattttttttattggatttattttagtttatatttaggtaggatgagtatttttttgaattattaagatattatttagaatataattttttggggttgtagtaatttttttaggtaatttaagtgttatttgtttataattttgagtaatattaatttaaagttttgaaaggtggatgtatttttgaaaatattaaaattttttgattttttatagagatttatattaataaaattttaagtaattatagaatatttaaattatgttttttatttatatttggttataagttatgaagtttgaataatagattaattattgattatgttataaggtaaaaaattatatgtaggtttttttttttataagtattttaatatgataatttaaaaaattttattttattttaataaataaaagtaattaaaatttttatatggttatattatttaaaagttaagtttatatagtttattattatagtatttatttaagtgggttaaattattttagttgataatttttgggggaagttaatatttataagttttgttgaatttgtgtttgttatagtgtttgatgttaaatgaatttggtttaaagtttaaaaattgtaaattttatttttgttaaatattatttgtatttgtttttattttttgtagtattatgttgattttttttttaattttgtatattattattatttttgattaattgaaggtattttttttataaatttagttagttataaaatttttatagtatattttttatattgtatttaaaaattaaataatttgtttattatttaaggattatttagttataattattagttatgttgtaaatattaattaatttattataagataaaatttgttttttttagtgttattagaaacgtttaataaaatattgtattattaaaaaagtattgtttagtataaagtattagtaattaattttattagttttttttttgaaaattttttaatgttttaaaaatataatttatatataaaattatattttatagaattttttgttttttggtttaggattgttttggtaatgcgggtttttttttggttttatatgaatttgaaagtagttttttttaattttgtgaagaaagttattggtagtttgatggggatggtattaaatttataaattattttggggagtatggttatttttatgatattgattttttttgtttatgagtatggaatgtttttttatttgtttgtatttttttttattttattgagtagtggtttgtagttttttttgaagaggttttttatatgttttgtaagttggatttttaggtattttatttattttgaagtaattgtgaatgggattttatttatgatttggttttttgtttgttattggtgtataggaatgtttgtgatttttgtatattgattttgtgttttgagattttgttgaagttgtttattagtttaaggagatttggggttgagacgatggggtttttaaaatatatagttatgttatttgtaaatagggataatttgattttttttttttttaattgaatattttttattttttttttttgtttgattgttttggttagaatttttaatattatgttgaataggagcggtgagagagggtatttttgttttgtgttagtttttaaagggaatgttgttagtttttgttcgtttagtatgatattggttgtgggtttgttataaatagtttttattattttgagatacgttttattaatatttagtttattgagagtgtttagtatgaagggttgttgaattttgtcgaaggttttttttgtatttatttagataatcgtggtttttgttattggttttgtttatatgatggattatgtttattgatttgtatgtgttgaattagttttgtattttagggatgaagttattttgatcgtggtggatgagttttttgatgtgttgttggatttagtttgttagtattttattgaggatttttggattaatgattattagggatattggtttataattttttttttttgttgtatttttgtttggttttggtattaggatgatgttggttttataaaatgagttagggaggattgtttttttttttattgattggaatggttttagaaggagtgttattagtttttttttgtatttttggtagaattcggttgtgaattcgtttggttttggatttttttggttggtaggttattaattattgttttaattttagagtttgatattggtttatttagggattttagttttttttggtttagttttgggagggtgtattatttattttttttagattttttagtttattcgtgtagaagtgtttatagtattttttgatggtagtttgtatttttgtgggatcggtggtgatattttttttattattttttattgtatttatttgatttttttttttttttttttttattagttttgttagtggtttattaattttgttgatatttttaaaaaattagtttttggatttattgatttttttgaaggtttttttgtgtttttattttttttagttttgttttgattttagttattttttgttttttgttagtttttgaatgtgtttttttttttttttttagtttttttaattgtgatgttagggtgttaattttagattttttttgtttttttttgtgggtatttagtgttataaatttttttttatatattgttttaaatgtgttttagagattttggtatgttgtgtttttgttttttttggttttaaagaatatttttatttttgtttttattttgttatgtatttagtagttatttaggagtaggttgtttagtttttatgtagtttgagtggttttgagtgagttttttaattttgagttttagtttgattgtattgtggtttgagagatagtttataatttttgtttttttatatttgttgaggagtgttttatttttaattgcgtagttagtttttaataagtgtgatgtggtgttgagaagaatgtatattttgttgatttggggtggagagttttgttgatgtttattaggtttgtttggtgtagagttgagtttattttttggatatttttgttaattttttgttttatggagttttttaatgttgatagtggggtgttaaagttttttattattattgtgtggggagtttaagtttttttgtaggtttttaaggatttgttttatggatttgggtgtttttgtattgggtgtatatatgtttaggatagttagttttttttgttgaatttatttttttattattatgtaatggttttttttgttttttttgatttttgttgttttaaagtttgttgttttagagattaggattgtaatttttgttttttttgttttttatttgtatggtagatttttttttatttttttatttttggtttttgatgttggtgatttatagatggggttttggtgtagatgttttttttgttgatgttggtgttatttttttttgtgtgttagttttttttttaatagttaggttttttagttgtaggtttgttggagtttgttggaggtttattttatattttgtttgtttgggtattattagcggaggttgtagaatagtaaatattggagaatagtaaatgttgttttttgattttttttttggaagttttattttagaggggtatttatttatatgaggtgtttattgttttttattgggaggtgttttttagttaggttatatagggatttatttgaggaggtagtttgtgtttttttagagtttaaatattatgttaggagaattattattttttttagaattgttagatagggatatttaagtttgtagaagttgtttgttgttttttgtttagttatgttttgtttatagatgtggagtttatagaggtagtagattttgttgatttatagtgggttttatttagttcgagttttttggttagtttgtttatttatttaagttttagtaatggtagatgttttttttttagttaggttgttattttattgtttgattttagtttgttgtgttagtagtgagtaaggttttatgggtatgagatttattgagttaggtataggagagaatttttttgtttgttagttgttaagattttgggaaaagtgtagtatttgggcgggagtgttttgtttttttaggtatattttgttttggttttttttggttagggaaaggaaattttttaatttttcgtgtttttcgggtgaggtaatgttttattttgttttggttcgtttttcgtgggttgtatttattgtttaattagttttaattagatgaattaggtattttagttggaaatgtagaaattatttattttttgtatcgattatgttgggagttgtagatcggagttttttttatttagttattttggaaaataagttttagttagatggttttaatgtttaatttttttaatttattttaaataagaatttatttaatatatgtattagtttatttttatattgttataaagaaattttcgaggttgggtgatttataatgaaaagagatttaattgttttatggtttggtaggttttaaggaagtatagtgttggtatttgtttttggtgaggttttagaaaggttataattatgttggaaggtaatcgggatttagtatgttatatggagagaataagagtaagaaagagagggaggaaatgttatgtttttttaaaaataattagattttaggtgaattaatagagtgagaatttatttattatgaaggtgatgttatttattaaagatttgtttttatgatttaatattttttatttggttttatttttaagattgaggattatattttaatatgagattaggaggagttaaatatttaaattatattattttttttttggttttttaaattttatgttttttttatattataaaatatatttattttttttaatagttttttaaagttttattttattttagtattaatttaattaaaagtttaaagttatatttgagttttaagttgagttttttttatttataaatttgtgaagttaaaataagttatttatatttaagatataatggtggtagaggtattgagtagatattttattttaaaagggagaaattagttaaaagaaagaggtaattggttttatgtaagtttgaaatttagtagggtaggtattaaattttaaattttaaaataattttttttgtttttatgttttgtattttgggtatattggtgtaagatgtgggtttttaaagttttgggtagttttgtttttatggttttatagaatgtaatttgtggttgttttaatgggttggagttaagtttttgtggtttttttatgttgagtttgtaagttgttgtggttttattatttttaggtttggaggttcgtggttttttttttatagttttattaggtagtgttttgttggggattttgtagggttttaaattttatatttttttttagtattgttttagtagtatttttttgtagggattttgtttttattgtaggtttttgtttgggtatttaggtttttttatatattttttggaatttaggtgggagttgttaagttttttttatttttgtattttgtatatttgtagttttaatattatgtggaagttgttaaggtttatagtggtttgtattttttaaagtggtagtttgagttgtatttatggttttgtgagttatgggtggagttggagtggttaggatgtagagagtggggttttaagattgagtagggaagtaatgttttgtgtttggtttttgaaataattttttttttttaggtttttgatttgtaatgagaggggttgttttaaagatttttgaaatgtttttaagttt

SEQ ID NO: 7 - DNA, 7990 bp, Artificial Sequence
  chemically treated genomic DNA (Homo sapiens)
gggaggttgagataggagaatggtttggatttgggaggcggaggttgtagtgagttgagattacgttattttattttagtttgggttataagagtaaaattttgttttaaaaaaaaaaaaaaaaaaagggagaaatagaaatttttgtgtcgtatatagatattagggttttgtatgtgtttttgtttttgtattttttatttttatatttttatattttcgttagattagttgttaattttttttttttggtattttttggtggttttttttacgtagttgattggattaaatgtatgtatatatatgtatattgtaaaattttatatattattattgtagaattttttaaattttttatttaaatatgtattattgtttgttggttttttttgttttattttttgtttttatagtgttatttttttaattattgttatttttaagatttttgattttttagtttttttatattaaaagttttttttgatattttttttttttcgtgtttttttgtttttttatttatttagtataaagtttgaagatgtttttatagagaagttttaaattattttagtatattttattgtatttatatttttttattttaaaaatttttttgttatttttgtttaatatttatattttatttttttttatatttttaatttatttgttttatatatatttgttttttgtggtattattttttttatttttattttatttagattttatatttttttattttattttattttttttgtttggtgtttttttttaaatttaaggtttttgttttttattagttatttttttattttttatttttaaattttggtaattttggttttttttttttttaaaaagtttatattttgttaatgtgtatatattgtttatttgagtgtttttaaataaatatttattttttaaaatagtgaaatttgaattattagtatggaaataatttttgggaagataagatttttatttaaaagttttaaattgagatttttttgtttatgttgaatgatggttttatttaatattttttgaaatagggtgattatttgaattatataaaattgtgaaatgagaatatttttgattttatatttttatttttttttttttttttgagatagagttttattttattatttaggttggagtgtagtggtagttttggtttattgtattttttattttttaggtttaggtgattttcgttttttggttttttaagtagttgggattataggtatgtgttattatattcggttaatttttgtagtttttggtagagatggggttttattatgttggttaggttggttttgaatttttgattttaagtgatttatttattttagttttttaaagtgttgggattataggcgtgagttattgtgtttggttatttatatttattttgattgatttgaaataaaatttaatattttagggaaggtaatttttatgtgttttgaattatattgagtattaattttttaggataattatagatttggaaaggtttaatttagttttttagtttatgttgaagtttttttaagtgataggaggaatttataatttataaggtaatttaatttatttggtgttattatcgattgttataaagtttatttttgggttaaaatttattatttatagttgtatttaatgattttaattttgtttttaagttatataaaatttggatttgttttttatatgataattttttagatattttaaggtagttagtttattttttttatttttttttttatagtttttttattttttgagataaatatttttcgttattttaattattttttatatggtattatttttattatttcgattgttttttaaggatgttaaattttgttaatgttttttttaaaatgtatttggaattggaaataatattttttggtagttgaattggatttggatgttgtatatttggatattaatgtagtttgaagttgttgtaagttttttagtcgatttgtaatgttggtttatgatgaatttgtaattaaataaaattttaaggttttaatttggaggattgtttttaagtgatttttttttaaattaagttttaatttttttttagttatgtaatagattttttttgtttgttttttgagacgttcgttttgtcgtttaggttggggtgtagtggtacgattttagtttattgtaatttttattttttgggtttaagtaatttttttgttttagttttttaagtagttgggattataggtattcgttattatgtttggttaatttttttttttttttttttatttttttttagtagagacggggtttttttattttggttaggttggtttcgaatttttgattttaggtgatttattttttttagttttttagagtgttgggattataggcgtgagttattacgttcggttttttttgagatggagtttcgttttgtcgtttaggatggagtgtagtggtatgattttggtttattgtaattttcgtttttcgggtttaaggtatttttttgttttagtttttcgagtagttgggattataggtatttgttattacgtttggttaatttttgtatttttagtagaggtgggggttttattatgttggttaggttggtttcgaatttttgattttaagttattcggttattttggttttttaaagtgttgagattataggtatgagttatcgtgttcggtttatgtattagatattttttaaaaattagatgtaagattttatatttatttttattaaattttattttattagtttattaggtagttttggttttttttttttttttttttttttttttttttttttttttgagatagagttttatttttgttgtttaggttggagtgtagtggcgcgattttagtttattgtaatttttgtttttcgggtttaagcgatttttttgttttagttttttaagtagttgggattataggtatgttttattacgtttagttaattttgtgtttttagtagagatagggtttttttttgttggttaggtcggttttaaattttcgattttaggtgatttgtttatttcggttttttaaagtgttgggattataggtgtgaattattatgttcggttgttttttttaagattagttaagtgtagagtgagaaggggggaaagagtagaataaggagtttgattagttttggtttttttgaattttgatttttgttatttagtttattgtgttgatttaataaagggttttgaagttaatgttggaatgtttttagatatataggaaatgataatttattaaaagttatggagattatattttaaaagttttatgtagatataatttagttgttgaggtatatgagttaatattattataaattgatatggttaggaaagattgaagtttattgttagtttgttttgtgttgaatattattttaaaagagattaaattttaaggtatattgtgttaatataaaggtaaaagagttggttaattttttttaagaaattaattaatggtagggcgcggtggtttacgtttgtaattttagtattttggaaggtcgaggcgggtagattatttgaggttaggagtttaagattagtttgattaatttggagaaatttcgtttttattaaaaaatataaaattagtcgggtatggtggcgtatgtttgtaattttagttatttgagaggttgaggtaggataattgtttgaatttgggaggcggaggtcgtatgaattagtattatattattgtattttagtttgggtagtaagagtaaaattttattttaaaaaaaaaaaaaattaattaatgtacgtataatatagagatagagttattgttattatttttttattttgtttttgataagtttatattgagtatgttattaggtaatgtgggagattttggagaattaggtttgttttataattagggttattatatattttagtttgtttggggtaattttgatttatgtttgttgttttagtgtgattattattagtgtaattttttattttgagaagtgtttaggtttggaggataaattatttttttaataattgatattttttttataatttaacgggttttttttagtattttatttgggttaaaattattagttgtaatttggtagttttaataagattgtagtaatatttattttttatttgaatagattgttatttgattaagggaagttaatagtaaaagtaattgtagggtatatgtatgttatgggtaaaaaaaaaaaagtaatagtaattaaggtttgtaggtatttagaattttttttgagttattttttagagggtagtgttatatatatatttgtaattatttagttataataaaaaaagggtttttatttatgtatgaaaattagaaatattttatatttttaaagaatatattggaattaatattatgattaaaatatattttgttaagtaaagagatattaaaaattaatttattaatattttgaatattttttaatttgtaaaaataattttgatgttttgaatatataatgatttattataataattatgtatagattttaataatttgtatattttatgtttttatgttttttttaattaatgatttgatatggttaataattataatatattttgtattatagtttatatatttatgtaaaataagtatttaaaaattattagttttattttgtttgtttaaatattattttttttaaaaagagaaaataaaaatgttagattttattttatgatttgaatgatgtggtaatgtcgaattttagtatttagaattagaatgttttttagcggtcgtgtagttatttttatgttataagtggataatttgttagtttttataataaaagtttgttgtttgtgttttatattttggattttttaatataatgttttttttttagaaaaggtggataagttttatttttaagagaagatgatttttaatagttttgaaggatttaaaatttgtgtatttgtagatattaataaggaagaagaatttgtagaagagtttaatagattaaaaatttttgttaattttttaagtggtagttttgttttagtattaatattggtacgagtagggtttttttatattggtgaaggagatatcgtgcggtgttttagttgttatgtagttgtagatagatggtaatatggagatttagtagttggaagatataggaaagtatttttaaattgtagatttattaacggtttttattttgaaaatagtgttacgtagtttataaattttggtatttagaatggttagtataaagttgaaaattatttgggaagtagagattattttgttttagataggttatttgagatatatgtagattattttttgagaattgggtaggttgtagatatattagatattatatattcgaggaattttgttatgtatagtgaagaagttagattaaagtttttttagaattggttagattatgtttatttaattttaagagagttagtaagtgttggattttattatataggtattggtgattaagtgtagtgtttttgttgtggtggaaaattgaaaaattgggaattttgtgatcgtgtttggttagaatataggcgatatttttttaattgtttttttgttttgggtcggaattttaatattcgaagtgaatttgatgttgtgagttttgataggaattttttaaatttaataaattttttaagaaatttatttatggtagattatgaagtacggatttttatttttgggatatggatatatttagttaataaggagtagtttgtaagagttggattttatgttttaggtaaattttattataaaattaataaatagttttttaagtatgttagggtttataaaaagtaaatagatgtttttagttttttgaattggtaaatatttaggtataatttggtatgattatatatatatttgtattatttcgtgaatttttatgttgaatttgtaatgtaattattgaatttatgtgaaaaagattattatattatgagttatgtttttttttatgtaattgtttttaggaagtagataatttgtaaaagatggtagatatttttaatagtaaaatgggtttaatagtaatattaattattatttattgagtatttattataagtgtttaatatatatattttatgtattttttttaagttttataatagttttgtttgtttgtttttgagatagagtttcgtttttgttatttaggttggagtgtaatggcgtgatttaggtttattataatttttatttttcgggtttaagcgatttttttgttttagttttttgagtagttgggattataggtatgtgttattacgttcggttaattttgtatttttagtagatatagggtttttttttgttggttaggttggttttaaatttttgattttaggtgatttattcgtttcggttttttaaagtgttgggattataggtgtatgtattatgtttggttaatttttgtatttttagtagagatagggttttattatggttaggttggtttcgaatttttgattttgtgattcgttcgttttggttttttaaagtgttgggattataggtatgagttattgcgtcggttatatgagtatttttaaatggattgtggtagatattttaggaagggttattggagtgattgtttttaaagatattttaaaaagttatattattatatatttgatttatttattttaagattgaataatgtttataaaatattggttatttcgaaagattttatttatgtattattatatagtaattttgaaggtttgtttagtgttatgtagttataaatttagagaaatttataattttattatgtagaattttaatgttattaatatttgaaatataatttgttttaaaattttatagtttgaaatagtaaggataatattggtggtttaaataatatattaaaaagaaagtatggtcgggcgcggtggttttcgtttataattttagtattttgggaggttgaggtgggtggattatttgaagttaggagtttaagattagtttggttaatatggtgaaatttcgtttttattaaaaatataaaaattagttgggcgtgatggtatgcgtttgtagttttagttatttgggagattgaggtaggagaattatttgaatttagaaggtagaggttgtagtgagtcgtgatcgcgttattgtattttagtttgggtaataagagtaaaattttattttagaaaaaaataataataattaataaataaataaataaataaataaataaataaatgaaaataaagtatgttaggtatagtggtttacgtttgtaattttaatattttggaaggtcgaggcgggtggattatttgaggttaggagtttaagattaggttggttaatatggtgaaattttatttttattaaagatataaaaaattagtcgggtgtggtggcgtatgtttgtaattttagttatttgagaggttgaggtaggagaatcgtttgaatttaggaggtaaaggttgtagtgaattaagattgcgttattgtatttcggtttggggaatagagttagatttagttttaaaaaaagaaagaaagtaataattttagtttttaatataaaatttgggtagttttatttttgttttttataaaaatattttatattgaattagtgaatttagtgtgtattttttttttaaaggataaaaattatatttgttatttagatgtgaatttgaatgttttgttttaagttgtgagatttttatgttttttagatgtgtttaatttttaggtgttaaatgaatatttttgtgtaagtttttaattgtataaatatatatatttttgtgtgttttcgtagg

SEQ ID NO: 8 - DNA, 7990 bp, Artificial Sequence
  chemically treated genomic DNA (Homo sapiens)
tttacgaaaatatataggaatatatgtatttgtgtaattagaagtttatataaaaatatttatttaatatttaaaaattaagtatatttaaaaaatatgaaaattttatagtttaaaataagatatttaaatttatatttaagtaatagatatgatttttattttttgaggaagaaatatatattaaatttattgatttaatgtgaggtatttttatagaagataaaaataaaattgtttaagttttatgttaaaaattaaaattgttattttttttttttttttgagattgagtttggttttgttttttagatcggagtgtaatggcgtagttttggtttattgtaatttttgttttttgagtttaagcgatttttttgttttagttttttaagtagttgggattataggtatgcgttattatattcggttaattttttatatttttggtagagatggggttttattatgttggttagtttgattttgaatttttgattttaagtgatttattcgtttcggttttttaaagtgttgggattataggcgtaagttattgtatttggtatattttatttttatttatttatttatttatttatttatttatttattaattattattatttttttttgagatggagttttatttttgttgtttaggttggagtgtaatggcgcgattacggtttattgtaatttttgttttttgggtttaagtgatttttttgttttagttttttaagtagttgggattataggcgtatgttattacgtttagttaatttttgtatttttagtagagacggggttttattatgttggttaggttggttttgaatttttgattttaggtgatttatttattttagttttttaaagtgttgggattataggcgggagttatcgcgttcggttatattttttttttagtatgttatttgggttattaatattgtttttattgttttaaattgtgaaattttaaaataagttatgttttaagtattagtaatattaaagttttatataatgaaattgtaagtttttttaagtttatagttatatgatattaaataaatttttaagattattatatgatggtatataaataaaatttttcgaaataattaatattttataggtattatttaattttaaaataaatgggttaaatatataatggtataattttttaaaatatttttagaagtaattattttaatggttttttttgaaatgtttattatagtttatttgaaagtatttatatggtcggcgtagtggtttatgtttgtaattttagtattttgggaggttaaggcgggcggattataaggttaggagttcgagattagtttggttatggtgaaattttgtttttattaaaagtataaaaattagttaggtatggtgtatgtatttgtaattttagtattttgggaggtcgaggcgggtggattatttgaggttaggagtttgagattagtttgattaatagggagagattttgtgtttattaaaaatataaaattagtcgggcgtggtggtatatgtttgtaattttagttatttaggaggttgaggtaggagaatcgtttgaattcgggaggtggaggttgtggtgagtttaaattacgttattgtattttagtttggataataagagcgaaattttgttttaaaaataaataaataaagttattgtgaagtttagagaaaatgtatgaagtatatgtattgagtatttatagtaagtgtttaataaatgatggttaatattattattagatttattttgttattggggatgtttattattttttgtaagttatttattttttaaaaataattatatgaagagaagtatgatttataatatggtagttttttttatataaatttagtagttatattataggtttaatataagagtttacggaataatatagatatatatataattatgttaagttatatttaaatatttattagtttagggggttaagggtatttatttattttttatgagttttggtatatttgggaagttatttattggttttataataaagtttatttaaagtataaaatttagtttttgtaagttgttttttgttaattgagtatatttatgttttaaaagtaaagattcgtgttttataatttgttatggatggattttttggaagatttgttgaatttgggaaatttttattagaatttatagtattagatttatttcgaatattaagatttcggtttaaaataaagaagtaattaggaaagtgtcgtttgtgttttgattaggtacgattataaggtttttaattttttagttttttattataataaaagtattgtatttggttattaatatttgtgtagtagagtttagtatttgttaatttttttggggttaggtgagtatagtttggttagttttgaaaggattttaatttagtttttttattatatatggtagggtttttcgggtatatggtgtttgatatatttataatttgtttagtttttaaaagatagtttgtatgtgttttagatggtttgtttaaggtaaaatgatttttgttttttagatagtttttaattttgtattgattattttggatattagaatttgtagattgcgtggtattatttttaagataaaagtcgttgataaatttgtaatttggggatatttttttgtgttttttaattgttgagtttttatattgttatttatttatagttgtatgataattaaagtatcgtacggtattttttttattagtataaagaaattttgttcgtgttagtgttgatgttgaaataggattattatttggaaaattagtaaaagtttttaatttattaaatttttttataaattttttttttttattgatgtttgtaggtatataagttttagattttttaaaattgttaaaagttatttttttttgaaaataggatttgtttattttttttaaaaagagaatattatattaggaaatttaaaatgtgaaatataagtaatagatttttgttataggagttaataaattatttatttatgatataaaaataattatacgatcgttaagaaatattttaattttaaatattagagttcgatattattatattatttaagttataaagtaaaatttagtatttttgttttttttttttgaggaaagtaatatttaagtaggtagaataaaattaataatttttaaatgtttattttatataaatatgtaaattgtgatgtagaatatattataattattaattatgttaaattattaattaggaaaaatatgaaagtataaaatatgtagattattaaaatttatgtataattgttataatgaattattatatatttaaggtattaaagttgtttttataagttaaaaaatgtttagaatgttaatgaattaatttttaatatttttttgtttagtaaaatatgttttaattataatattggttttaatgtgttttttaagagtatgaaatatttttgatttttatgtatgaatgagagttttttttttgttgtaattggataattatagatatatatgtaatattgttttttagagggtggtttaggaaaaattttaagtatttgtaaattttaattgttgttatttttttttttttgtttatgatatatatgtgttttgtagttatttttgttattaattttttttggttaagtaataatttgtttaaatggaagataagtattgttgtagttttattagagttgttaaattatagttggtaattttaatttagataaaatattaaaaggaattcgttaggttatgagaagggtattaattattagaaagataatttattttttaaatttggatattttttaaagtgaaaaattatattagtaataattatattgggataataggtataaattagggttgttttaggtaaattagagtatatggtaattttagttatgaggtaaatttggttttttagaattttttatattgtttgataatatgtttaatataaatttgttaaaggtaaaataagagaatggtaataatgattttgtttttatattatgcgtgtattaattgattttttttttttttgagatggagttttgtttttgttgtttaggttggagtgtaatggtgtgatattggtttatgcgattttcgttttttaggtttaagtaattattttgttttagttttttaagtagttgggattataggtatgcgttattatgttcggttaattttgtattttttagtagagacggggtttttttaggttggttaggttggttttgaatttttgattttaggtgatttgttcgtttcggttttttaaaatgttgggattataggcgtgagttatcgcgttttgttattaattgattttttgagaagaattagttagtttttttgtttttatgttgatataatatgttttaaaatttaattttttttggagtaatgtttaatataaagtaagttggtaatggattttagttttttttggttatgttaatttatagtggtattaatttatatattttaatagttgagttatatttgtataaaatttttggaatatagtttttatgatttttgatgaattattattttttatatgtttgaaaatattttaatattagttttaaggttttttgttgaattagtataataaattggatgataaaaattaagatttaaagaaattaaggttgattaaattttttgttttatttttttttttttttttattttgtatttgattagttttaaaaaaaatagtcgggtatggtggtttatatttgtaattttagtattttgggaggtcgaggtgggtaaattatttgaggtcgggagtttgagatcggtttgattaatagggagaaattttgtttttattaaaaatataaaattagttgggcgtggtggagtatgtttgtaattttagttatttgggagattgaggtaggagaatcgtttgaattcgggaggtagaggttgtagtgagttgagatcgcgttattgtattttagtttgggtaataagagtgaaattttgttttaaaaaaaaaaaaaaaaagaaaagaaaagaaaagaaaaaaattaaggttatttgataggttaatgagataaaatttaatagggataagtataaagttttatatttggtttttaaaaaatatttggtgtataggtcggatacggtgatttatgtttgtaattttagtattttgggaggttaaggtggtcggataatttgaggttaggagttcgagattagtttgattaatatggtgaaatttttatttttattaaaaatataaaaattagttaggcgtggtggtaggtatttgtaattttagttattcggaaggttgaaatagaagaatgttttgaattcggggagcggaggttgtagtgagttaagattatgttattgtattttattttgggcgatagagcgaggttttattttaaaaaaggtcgggcgtgatggtttacgtttgtaattttagtattttgggaggttgaggagggtgggttatttgaggttaggagttcgagattagtttgattaaaatggagaaatttcgtttttattaaaaaaaaataaaaaagaaagaaagaaaattagttaggtatgatggcggatgtttgtaattttagttatttgggaggttgaggtaggagaattgtttgaatttaggaagtggaggttgtagtgagttgagatcgtgttattgtattttagtttgggcgatagagcgagcgttttaaaaaataaataaaaaaaatttgttgtataattaaaagaagattgagatttagtttaagaagaaattatttaaaggtaattttttagattaaaattttgggattttatttaattataaatttattataagttaatattataagtcgattaaaaaatttatagtaattttagattgtattagtgtttagatgtgtaatatttagatttaatttagttattaagggatattatttttagttttaaatatattttggaagggatattaataaagtttaatatttttagggagtaatcgggatgataaaaatgatattatatgagaaatagttggaatagcgaaggatatttattttaaagggtggaaaaattgtgaggggaagggtagagaggatagattaattattttaagatatttaaaagattattatgtagaaaatagatttaaattttatatagtttgagggtagaattaaggttattaaatataattgtaaatagtagattttaatttaaggatgggttttataataatcgatggtagtattaaatggattgggttgttttgtagattatgagttttttttattatttaaaggaattttagtatggattgggagattgggttaaatttttttaagtttataattattttgaagaattaatgtttagtataatttaaaatatatgagaattgttttttttgaggtgttaaattttattttaagttaattaaaatagatgtaagtggttaggtatagtggtttacgtttgtaattttaatattttgggaggttgaggtgggtggattatttgaggttaggagtttaagattagtttggttaatatggtgaaattttatttttattaaaaattataaaaattagtcgggtgtggtggtatatgtttataattttagttatttgggaggttaagggacgagaattatttgaatttgggaggtggagggtgtaatgagttaagattgttattgtattttagtttgggtgatagagtgagattttgttttaaaaaaaaaaaaaaaaatagaagtataaaattaaagatatttttattttataattttgtgtagtttaagtagttattttattttagaaaatattagataaaattattatttaatatgagtaggagaattttaatttgaagtttttgagtggagattttatttttttagaggttgtttttatgttaatagtttagattttattgttttgaaaagtaaatatttatttagaagtatttaagtgaataatatatatatattagtagagtgtgagttttttgagaaggaggaaaattagaattattagagtttaagagtgaaaggtggaaggatgattgatgaaagatagaaattttgggtttggaggaaggtattaaataaaaagggtaagatagggtaaaaaaatataggatttaagtgaaatggaggtggggaaaatgatattatagaaaataagtatatatggagtagatgaattgagaatatagaagaaaatagggtatgaatattagataagggtgataaaaaggtttttgaagtgaaaaggtgtgggtgtaataaagtatgttgggataatttaaggtttttttgtgaaagtatttttaggttttgtattgggtaagtggaaaggtaggaaggtacggaaagagaaaaatgttaaagaaagtttttggtataaaggggttgggaagttaggaattttaagggtaatagtagttgggaaaatagtattatggaagtaaaaaatgggataaaaaggattagtaagtaatggtgtatgtttaaatgaagggtttgggagattttataatggtgatatgtaaggttttatagtatatatgtatgtatatatatttagtttagttaattgcgtaaagagagttattaggaggtgttaaggagaggaggttgatagttaatttagcgagaatgtgggaatgtggaggtgggggatatagagataaaggtatatataaaattttggtgtttgtatacgatataaaagtttttatttttttttttttttttttttttttttgaaatagagttttgtttttatggtttaggttggagtgaaatggcgtgattttaatttattgtaattttcgttttttaggtttaagttatttttttgttttagtttttt

SEQ ID NO: 9 - DNA, 5314 bp, Artificial Sequence
  chemically treated genomic DNA (Homo sapiens)
  unsure (17, 36, 247, 958, 1442, 1554, 1558, 1752, 2756, 2766, 2807)
  unsure (2961, 3189, 3237, 3592, 3750, 4732, 4735, 4737, 5216)
tagttttaggagggagntggcgtttatataggacgnaggggtttggtttgggtagaagagggtagagatttttttttggattgaatttaagggaggagtattttaggcgggagttgtaggaggttgtgttggtttttttaggggaagggaaggggagggaaagaaaattttattttaaaaaaaaaaaaagaaaaaagaagtttagaaattcgcggagatattattatattattttttttaggttggnagtgtagtggtttaattatggtttattgtagtttcgattttttaggattaagtgatttttttattttagtttttcgagtagttggaagtataggtgtacgttcgattgatttttttttttttttttagacggagttttatttttgttgttttggttggagtgtaatggtaggatttcggtttattgtaatttttgttttttagatttaagcgattttcgtgttttagtttttcgagtagttgggattataggtgtttattattatgttcggataattttttgtatttttaatagagatagggttttattatattggttaggttggttttaaatttttgattttaggtgatttatttgttttagttttttaaattgttgggattataggcgtgagttatcgggtatggttttttttggttaattttttaaatttttgatagagatggggttttagtgttgtttaggttgattttgaatttttagatttaagtgattttttttttttggttttttaaagtgtagaaacgataagtttaatttaaattttcgagagagaaaatatttttttaaacgagggtaatgtgaatttgaaatgttatttgaggaaagatttgttcgtttgatattttgtttgagtttgggtggataggatagtatttgttagtatcgggaagtattgtagatgggaagaggtttggttattttttaaangtggtaggagttggagggggtgagttgaaggtaaggagaaaggaggtggggatttaggagataggggttgcgtagcgggttcggggttgatatttttacggatatagtttattggggtttaaatataaaaggaatttaattattgtgggaggaaaagatttttttgtttttttgttttttttttttttttttttttttttttttttttttttttttttttttgagatagagttttgttttatcgtttaggttggagtgtagtggcgtgatttcggtttattgtaagttttgtttttcgggattacgttatttttttgttttaatttttcgagtagttgggattataggcgtttgttattatattcggttatttttttgtattttttagtagagatggggttttatcgtgttagttaggacggtttcgattttttgattttgtgattcgttcgtttcggttttttaaagtgttgggattataggncgtgagttatcgcgtttggtttttttttttttttttttttttttttcgagatagagttttatttttgttgtttaggttggagtgtagtggcgtaattttggtttattgtaantttnttatttttagggtttaagcgatttttttgttttagttttttgagtagttgggattgtaggcgcgtattattacgtttggttaatttttgtatttttagtagagatagggttttattatattggttaggttggtttcgaatttttgattttgtgatttgtttattttagttttttaaagttttgggattataggncgtgagttatcgtgtttagtttgatttttttgtttttttaaaaattatgttcgtttttttatagtttttttttgttatattaagtttatatcgtaggtttaatttgtttagtgaatgttatgtaaatattttatgtatttgttgatcgtaggaatgatatgtatttggtacgtattgatcgtatttcggggtgggagaagagagggtaaggaagtaaagaatagttttttttttttttggtgtatttttagatgtgtcgatggggtttaggttcgttgtagatggttttttttttagagataggggaggattttttatttattttttagtttttaggattattttgatttttgtttttaggtatttaagttatgcgtttagatatgcggatatatttaagttgggtatagtatagtagttttattttaggtagtttgaaattagagttggggtttaaagggattatatttcgagggattgtgtgggggtcggggtatataggttattgttttttttcgttttttttagttatttttgaagttagttttattttgttttttagggattttaaatgtgtagagattttggtatttttgtagaagttttttttggttttaatttatatttggatgttgtggggttgtagttgttgttcgggttcgggaggatgttgggggttcggtgtttatgagtttttgaagtttttggaattcggttttgagggtgtttaggtttaggtggatatttgggttgtttttgtttatgtatttgatgatattgtgtgtagaagtgaaaaggagttaggtcgggtatgttggtttatgtttgtaattttagtattttgggaggttgaggcgggtggattacgaggttaggagtttaatattagtttggttaagatggtgaaatttcgtttttattaaaaatataaaaaaattagtcgggtatggtggcgggcgtatgtaattttagttattgggggggttgaggtagagaattgttgngaatttaggnagatggaggttgtagtgagttaagattgtgttattgtattngtattttagtttggcgatagagtaagattttgttttaaaaaaaaaaaaaaaaagtgaaaaggagttgtttttttttttttttttgagggtaggtaattgttgcggttgttagtggaggtggtgcgtttttggtttgtgtttgggggttattttnagtagaggttatggtggtgttagggttcggttagcgagttaattagtaggatttaggggcgatttgttaaagttaattggatttgataattgtagcgaagttaagttttttgattttgatgattgtgttgtggttgtgtaagagaatgaagtatttcggggtagtatggtaatgtttttaatttataaacggtttaggtaaattatttatatatatatatatatatgntatgtgatatatatatatatagggatgtgtgtgtgtttatatatatgnaggggagagagattaggggagagaaagtaggttggggagagggagagagaaaggaaaataggagatagagagagagcggggagtagagagagggaaggggtaagagagggagaggaggagagaaagggaggaagaagtagagagtgaatgttaaaggaaataggtaaaatataaatagaaaatttgggtgaagggtatatgagtattttttgtattatttttgtaattattttttatttaaattgatatcgggtcgggcgtagtggtttatatttgtaattttagtattttgggaggtcgaggtaggtagattatttgaggttaggagtttgagattagtttggtaaatatggtngaaattttatttttattaaaaatataaaaattagtttggtgtggtggtgtatgtttttaattttagttattcgggaggttgaggtagaataatcgattgaattcgtggcggggaggaggttgtagtgagttgagattatgttattgtattttagattngggcgatagagcgagatttagttttaaataaataaataaatattaaaataaaaagttattgtataaaagaatgggggcggggtgggaggggtggggagaggttgtaaaaataaataaataaataaataaattttaaaatgaaaaagatagtggaggtattaggtttgcgtggggttggagggttaataaggttaggttttttatttttggttatagaattagagaagtgagtggatgtgatgtttagttttataagtgattttagaatattttgttttaaagtaaaggatatattgattttttttttaataggttgtaggatttattgttggtgggacgttttgttttgcgaagggaaaggaggagtttgttttgagtataggtttttattttttattgggttttttttagtttttttgtttttttattacggtagtggtttagtttttggtttttgattttagaaggtggtttttttggaaatttaggtcgtgtagttaacgatgtattcgtcgggatagcgatgtttgttgtattttattttttttttgtttatttgttttttatgttcgtttggagtagatgttttttgtagaggtggtattttgtaaagtttttttgtttgattttttttttttttttagattgagttttgtttttgttgtttaggttggagtgtaatggtataattttagtttattgtattttttgtttttcgggtttaagcgatttttttgttttagtttttcgagtagttgggattataggtatgtattattacgtttagttaatttttgtatttttagtagagataaggttttatcgtgatggttaggttggttttgaattttaggatttaagtgatgtttttgtttaggttttttaaagtgttgggattataggcgtgagttattgtattcggtttgtacgcgttttttgaaagtagtcgagggggcgttaggtgtgggtagggacgagttgngtngncggcgtcgttgggtgtatcgcgattacgggtagagttacgcggcgggaggattataattttcggtatatttcgcgtcgtttcgtttttatttttagaaggtcgcggggggtggatcgtttaagagggcgtgcgttttcgatatgtttcgcggcgcgttattaatcgttagatttgaatcgcgggattcgttggtagaggtggcggcggcggtatgggtgtttcgacgttgttttttgtttggtagtttttttttaaggattatcgtatttttatatttaagaattggttttttttggagggttgcgtttgtatttcggagcgggtgagattgttcggttttttggggttttttacgttcgttttgttttgtttttagcgaggttattgtgattgggtttcgggggtataagtcgttttttttttttcgttttgtttttagcgaggttattgtggttgggttttttgggtttaggtcggnttttttttttttgttttgtttttatcgaggtttttgtggttgggtttcggggtttcgggttgttacgtttatttacgagttgtgttgttttttgtaga

SEQ ID NO: 10 - DNA, 5314 bp, Artificial Sequence
  chemically treated genomic DNA (Homo sapiens)
  unsure (99, 578, 580, 583, 1565, 1723, 2078, 2126, 2354, 2508, 2549)
  unsure (2559, 3563, 3757, 3761, 3873, 4357, 5068, 5279, 5298)
tttgtaagggatagtatagttcgtgagtggacgtggtagttcggaatttcgaggtttagttataaaggtttcgatggggataaagtagggaggggaggntcggtttggatttaaggggtttagttatagtggtttcgttggggataggacggggaggggagggcggtttgtattttcgaggtttagttatagtggtttcgttagggatagggtaaggcgggcgtgggggattttaggaggtcgggtagttttattcgtttcggggtgtaggcgtagttttttaagaagggttagtttttgaatgtagagatgcggtggtttttgagaaagggttgttaggtagggggtaacgtcggggtatttatgtcgtcgtcgttatttttgttaacgggtttcgcgatttaaatttggcggttaatggcgcgtcgcggggtatgtcgggagcgtacgtttttttaggcggtttatttttcgcggttttttgggagtagaggcggggcggcgcggggtgtgtcgggagttgtagttttttcgtcgcgtggttttgttcgtggtcgcggtgtatttagcgacgtcgntngtntagttcgtttttgtttatatttagcgttttttcgattgtttttaaagaacgcgtgtaggtcgggtgtagtggtttacgtttgtaattttaatattttgagaggtttaggtaggagtattatttgagttttggagtttaagattagtttggttattacggtgaaattttgtttttattaaaaatataaaaattagttgggcgtggtggtgtatgtttgtaattttaattattcgggaggttgaggtaggagaatcgtttgaattcgggaggtagagggtgtagtgagttgagattgtgttattgtattttagtttaggtaataagagtaaaatttagtttaaaaaaaaaaaaaaagttagataggagagttttatagggtgttatttttgtaaaaagtatttattttagacgggtatgaaggataaatgaataggggagggatggagtgtagtagatatcgttgtttcggcgagtatatcgttgattgtacgatttgggtttttaggagggttattttttggagttaggggttagggattgggttattatcgtgataagaagataagggagttggggaaagtttagtggagggtgggggtttgtgtttagggtaaatttttttttttttttcgtaaagtagggcgttttattaatagtaagttttgtagtttattaaaaaaaaaattagtgtgttttttgttttggaatagggtgttttggagttatttgtggagttgggtattatatttatttatttttttggttttatggttagagataagaggtttggttttattagttttttagttttacgtaggtttggtgtttttattgttttttttattttggggtttatttatttatttatttatttttgtaatttttttttattttttttatttcgtttttatttttttatatagtaattttttattttgatgtttatttatttatttgaaattgagtttcgttttatcgtttnagtttggagtgtagtggtatgattttagtttattgtaatttttttttcgttacgggtttaatcgattgttttgttttagtttttcgagtagttgagattaaaggtatgtattattatattaggttaatttttgtatttttagtagagatggggttttnattatgtttgttaggttggttttaaatttttgattttaagtgatttgtttgtttcggttttttaaagtgttgggattatagatgtgagttattgcgttcggttcgatgttaatttaaataaaagataattgtaagaatagtataaagaatatttatatattttttatttagattttttgtttatgttttgtttgttttttttaatatttattttttgttttttttttttttttttttttttttttttttttttattttttttttttttttatttttcgttttttttttgttttttgtttttttttttttttttttttttttaatttatttttttttttttagttttttttttttntatatatgtgaatatatatatatttttgtatgtgtatatattatatgntatgtatatgtatgtatatgggtggtttatttgaatcgtttgtaagttgaaggtattattatattatttcgaaatattttatttttttatataattataatataattattaaaattaggaaatttaatttcgttgtagttattaaatttagttgattttggtaggtcgtttttgggttttgttgattggttcgttaatcgggttttggtattattatggtttttgttnggggtggtttttaggtatagattaaggacgtattatttttattggtaatcgtagtagttgtttgtttttaggagggaggaaaggaataatttttttttattttttttttttttttttgagatagagttttgttttgtcgttaggttggagtgtnagtgtagtggtataattttggtttattgtaatttttatttntttgggtttntagtaattttttgttttagtttttttagtagttgggattatatgcgttcgttattatgttcggttaatttttttgtatttttagtagagacggggttttattattttggttaggttggtattgaatttttgatttcgtgatttattcgttttagttttttaaagtgttgggattataggtataagttagtatgttcggtttaatttttttttatttttgtatataatgttattaaatgtatggataaggatagtttaggtgtttatttggatttgaatatttttaaaatcgagttttaggagttttaaaagtttatgggtatcgggtttttagtattttttcgagttcgagtagtagttgtagttttatagtatttaggtgtaagttaggattagaaggggtttttataaaagtgttagagtttttgtatatttgaaatttttgagaagtagagtgaggttgattttaggaatggttgagaaagacggggggaagtagtggtttgtgtgtttcgatttttatatagtttttcggggtgtggtttttttggattttagttttgattttaagttgtttggggtggggttgttgtgttgtgtttagtttgaatatattcgtatgtttagacgtataatttgagtgtttgaaggtaggagttaggatggttttggaggttggggagtgggtggaggatttttttttgtttttgggaagggggttatttgtagcgagtttgggttttatcggtatatttgaaggtgtattaggaaaggagggggttattttttgtttttttgttttttttttttttatttcgaggtacgattagtgcgtattaagtatatattatttttgcgattagtaggtgtatgaaatatttgtatagtatttattggataaattaggtttgcggtgtggatttaatatgataagagaaggttgtgagagaacgaatatagtttttgaaagggtagaggggttaggttgggtacggtggtttacgntttgtaattttaggattttgggaggttgaggtgggtagattataaggttaggagttcgagattagtttggttaatatggtgaaattttgtttttattaaaaatataaaaattagttaggcgtggtggtgcgcgtttgtagttttagttatttaggaggttgaggtaggagaatcgtttgaattttggaggtggnaggnttgtagtgagttaagattgcgttattgtattttagtttgggtaataagagtgaaattttgtttcggaaaaaaaaaaaagaaagaaaaaagagttaggcgcggtggtttacgntttgtaattttagtattttgggaggtcgaggcgggcggattataaggttaggagatcgagatcgttttggttaatacggtgaaattttatttttattaaaaaatataaaaaaatagtcgggtgtggtggtaggcgtttgtagttttagttgttcgggaggttgaggtaggagaatggcgtgatttcgggaggtagagtttgtagtgagtcgagattacgttattgtattttagtttgggcgatagagtaagattttgttttaaaaaaaaaaaaaaaaaaagaaagaaagaaaaagaaaaaaagaaaaggtagaaaggtagaagagttttttttttttataatagttgggttttttttatgtttgagttttagtgaattgtattcgtgggggtgttagtttcgagttcgttgcgtagtttttgttttttgggtttttattttttttttttttatttttagtttattttttttaatttttgttatntttggagagtgattaagtttttttttatttgtagtgtttttcgatgttggtaggtgttgttttgtttatttaggtttaaataggatgttaggcgaatagatttttttttaaatggtattttagatttatattgttttcgtttaaaaaagtattttttttttcgggggtttgggttgggtttgtcgtttttgtattttgggagattaaggagggaggattatttgaatttaggagtttaagattagtttgggtaatattgagattttatttttattaaaaatttaaaaaattagttaggaaaggttatgttcggtggtttacgtttgtaattttagtagtttgggaggttgaggtaggtggattatttgaggttaggagtttgagattagtttgattaatatggtgaaattttgtttttattaaaaatataaaaaattattcgggtatggtggtgggtatttgtaattttagttattcgggaggttgaggtacgagaatcgtttgaatttaagaggtagaggttgtagtgagtcgagattttgttattgtattttagttagagtaataagagtgagatttcgtttaaaaaaaaaaaaaaaaattagtcgggcgtgtatttatatttttagttattcgggaggttgaggtggaaggattatttgattttgggaggtcgaggttgtagtgagttatgattgggttattgtattnttagtttgggggggatagtgtgatagtgttttcgcgggtttttggattttttttttttttttttttttttgagatgaagttttttttttttttttttttttttttttagaaggattagtatagttttttatagttttcgtttggggtgttttttttttgaatttagtttaggaggaagtttttgtttttttttgtttaggttaagtttttncgttttgtgtggacgttantttttttttggagttg

SEQ ID NO: 11 - DNA, 17580 bp, Artificial Sequence
  chemically treated genomic DNA (Homo sapiens)
attttagggggacggtataagtttattatgataggagtagtaaggagtcggttagaggagggggtagttacgatttttaggattttgggtaagaagcggtagataaatttggtataggggtttagggtgagggggattggggtttgggtattttgtgggggagggagggggattacgtttgtggggtggagtagagattgtggtggtggtcgtttggttttggtatttgggagaagagtagaggagtggttttcgtttggttgtttttatattagttcggtttacgttcgatggtattatattagtttttagagtttagattgttcgatatattgtagtagagaaatagggttagttttaggatagtgattagggttatagttataagagttgtaggaggaagataggtttagaatagaatttttgtgatttagattttcggggtttaggataaagtatatttttaggtaagaggtggaggttttagtaataggaatttaggggattttatttagtatagatggggaagtaaaggttatggtaggggtggaaggtaagattcggttatttcggttttttatagtttgatggagttagcggggtgggcgggtagggtaggggtattgaggtagtgttacggtttttatttggtgtttttatttcggttgtgtttttaggagtagtttttatttttatagtgtttagttcggttaaagaagtaggatcgagaggtaaagatttgtttattgaggatgtggttggtgttttgggggaggaagttattatcgatatttatttttgttttgtattggttttttaggtttaattttagattttaatttaggatttgtaatattcgttttttttattggttttatagaagagggagtagatttttattaggttttgtgggggtcggtgtattcggaagaagtttattagtagggtggtgggtagtagtttttatacgaagaggatgaggttaaatattaggtagtttttgttttttaggttatttattaggttcgtttgtgggaaggtaggggttggtgttagtttgtagttacgttaaaggggtagtgggatagggtttaggttagttggggttaaggtgttacggttattaaggaggtggtagatatgcgtatgtttatttggttagatatattgtattagtcgtaatcgaaggtgtttagtcggttttggggggttaaggttagtgttgttaggttgtagtaggttcggttggtatagagtaggattatggcgttatttatcgcggtcgtttggtatatattggttttttggtataggtaataatagaggatttttagggagagaaggtttttagttttttttatattttgagaatcgttgtcgagagatttaaaagatatttgggtattagtgttgtagttttattttggtttttaggtagatgttagtggagggcgttcgtttggcgacgaggtagaggtaggtagtaagagatagcgcgtagatgacgaatagggagtcgtttattaggacgcggataagtagtagggtttagggttgtgttcggcgtcgatgggagagtatagtatatagtacgtttattagtagaaagagtagcgaggtttttataaaggtttttcggatagcgagtttgtagttatagtatagttagcgcgggtttttaatagtttttagtatttattatttgttttattttttgtaggaaattttaatgtcgataaaatttagggtatttagtttgagttttgtttttttatttttatagatggagaaattgaggtttaaaaaggttagaaggtgattgatagttatggtatttcggaaggtgtattaattggagttagaagtttttgtttgagttttagttttgcgattttgattttgttgttttatttggttgggttttagtttttttattttttaagggaggatagtagttttttagggaaattgtataaataaaagatggttgggaaagttttttataaatcgtaagatattgtataaatgacgagggtattgcggttttaggttatttaggagtgtatatggttttggtgtttttatgggttggagtttttagttcgttttttatggtggatgatattggggtttttttttttatattattataagtatttttatttttgtgttttgtagatttgtaaggtttttgttgagttatttgcgttaggtgttttaatttttttaagattttttatagatattttttgggttgtttttgttttagttttgagaggtgggaagggatttatatgggattgttatttgtttttgatttggaggttgagtttattagtgtttcgagtatttataagtttcggtttattttcggtcgacgttttattttggttttgaatattatttaggagtagagatgttttttatttttgtgggtttttgaggtttgttatttttcgttttttattcgggattatagttggttatttgggtaaagtagaggtttataagcgttaaggtgaagaattgtaggtagacggggtagtagtagagaagttagaagggtaagggttttaggcggttggcgcggggagtatttcggaagtagaaggagaagagggtggtacgtaaggcggtttagagtagatagagggttaggaatatcgtttgatagttgagacgtttgtgtttatatagaagtattagttagagttgggtatagacggagaagaagagtagggtatatagggtggtgtaggtagttgttagttttagggttatagtaggtggtagcgtaggtattagttcggtagtaggtattaggttagataggttattttttatgttagggagggaggtttgaatttcggagatagataaggagggattgtcggcgggattagggaaataaatacggaggggtgggaattgtagggtgtagagagggagatggggcgtttaggaggaaagaagttgtggttgataggttttttttttttaatagagagatttttgtttttggggaatataggtagtttgggttttaggttttttatttaggggtatggaagggtagttttttttttttaggatagatcggataggggttgggggtgttttttttttgggtttattttagagttaaggatggggggatgtagaggtttaaggagaggattttttggtttcggtcgtttatgtcgttttgggtggagggggagagtcggttgatattcgtcgggttagggtagcggtcgttgcgaggggcgtttaatgtttcgttttttttttttttaagttgggggaggtttttttttttttaataatgcggatggggagggtttttgttttttgttttcgtaattttcgaaagttgttttcgttttatttttttttatcgcgtttacgttttagttttaaggggagggaggaggcggacgttaggtttttaggtcgttgatgggagagtcggtttaggtcgtggggattcggggtttcggtttttcggttttcgttgtttcgttttttttttcgttcgcgtttgcgcgggcgtcgttcgttacgtaaattgcgtagcggttcggttggattcgtagtttagcgtcgtattcggcgtgaaatcgtacgagaattggcgcgagttgcgtcgttggcgggcgttcggggttacgggaggcggtaggcgggcggtcgagttgcgggggtcgtgtcgtatttagggggttttcgggtgggtcgtgtttcgtgtcgttcgtttttatttgtatgggggttcgttagtttttacgttcgttttttttatatttaaatcggggtcgtgtcgttcggtcgggggcggtaacggattttcgtttttcggtttttgaagaaaattttcgtttatagttaagatggttttcgggtttcgttttcgggtttgaattcgcggagtttcgaatttttcgcgcgggttcgtttttcgtttcggcgcgttcgcggttttgtttatttggtcggtcgtttgttaggcgtgaagtttttacgggttttacggtttttttttatcgggttttcggtttttttttcgcgttcgggtagttattttagttagggaggaggtttttttttttatttttagtgttttcgagatggcgcgggaggtgtttttcgaggcgggcggcgcgaagttttcgcgtttgggaggaggagcggggagcgggatttttcgatcgggtatttagtttaggcggagcggtaataatagtaataataattatattcgacggttgagttttagttgtggttgtgttaagcgttttcgttcgtagtaattattttttttataaagtttttattggttttcgggggagttgttattatttttattttattggggggaaattaaggtttagagaggttgaaggatttgttggtagaagtgggtttttaggttttaaatggggattttagagaattttttttttgtttttatatacgtttaaggtgtgaggtagcgaggatgtgagtttcggggtcgaaggagggaggaaaaaggttgcggacgaggagttttggattcggcgggggggcggggtcgggtcgggttgatttcgtttttggatttattcgagtgacgtttcgagaggtgattgggttaggtcgttgatagttttcgttgtttaagtaattagggttcggagttcggggtgttggagggaggcggtaggttcgggttaggggtttcgagatcgggtttggggtgagatttgtgcgtcgttattacgggcggggcggggtttgggtttatcggggttttgaggggagattgaggttttgagtcgatagttttagttttttgttaggttagattcggtagatagatgagggtttaggaggtttggcgggtttgggggcgttacggtgggagaggaagttaggggtatttgtttttgttttttagggttatcgttggttttagttgtgttttgattacgtaatattttgtttttatagtttagagtatgttttagattttagagtttgagtcgagtgagtaggaagattttagttttgtagagaggggtttgggttttagtttcgtaggggacgggtttttaggtttcggtaagtattatcgttaggttttaggttttttgtgggacgttagttattagtaggagtagttaattagtagtagttattatggaggtaagtattttattatttttatttgtcgggatattttatttttagtttattggttttttgtattttagttgtatttataggtattgaatgttttgggtcggtttttaaatttttagagttttagttttttttttcgtaaaatagtaattaataattattattgtaggattgttgagttaattagtaggaatatataggatgtatttgattatagagttggtgtatattaaagttaaaaaatggttgttgtcgggcgtggtggtttatatttgtaattttagtattttgggaggttaaggtaggaggatcgtttgagtttagaagtttaaggttagtttgagtgatttagggagattttagtttttaaaatatatatatatatatatagtagttattagtgtggggttaggatagaaattagtgataggtaggtagtgattcgaaaaggaaaaggggtttgtttaaggttatatttttttggtgtttttttttttagaatgtgggggttggaagtttttttggtgttttgttttaggttatatgttttttttgggattaggttttttagtttttagatgtgtttttttttgttttgtggttcgtatttatagtaggattgttttggtatagtggttaggggtagatgattttaaggggtagatagtttttttagatagtatggttgtgtggggtgagaagtataggttttaagatggaaggatggatattggggttttatgtttattttttagtaggttttagtatttttgtgtttagtattggttttggtatttggaataataatagatattttttgaatataaaaattaggttaagttgggtggggtggtatatgtttgtagttttagtaatttaggaggttggtttgagtttaggaatttaagattagtttgggtaatatagttagattttatttttaaaaatagaaaattaggttatgttattttggtattgtagtttaaaagattttttttttatttttaggattaagaaggtttaagaggttttttttttttcgtttttttacggataaatatttatattcgatttttttagattggattttatagtttgttttttttttttttgtttgttttgttttgttttgagatagggtttcgttttattatttaggagggagtatagaggtgcgattttagtttattgtagttcggaatttttgggtttaagtgatttttttacgtaattgggaatataggtgtgtggattatatttagttaatttattttttatttttttttttttttttttttttttttttgagacggagttttattttgttgtttaggttggggtgtagtggtgtaatttcggtttattgtaatttttgttttttgggtttaagtagtttttttgttttagtttttagagtagttgggattataggcgcgtgttattatgtcgggttaattttttgtatttttattagagatggggttttatcgtgttagttagggtggtttttattttttgatttcgtaatttattcgttttagttttttaatagtgttgggattataggcgtgagttattatgtttagtattttttatatttttatgagatgagggtaggggcggggtttttttttgttgtttaggtaggttttaaatttttgggtttaaacgatttttttgttttagtttttagaatagttgggattataggtgtatgttattatattagtttattttttattttttgtagaggtggggttttgttttgttgtttagttttgtttcgaatttttgggtttaagtaatttttttattttggttttttagattgttgagattattggcgtgagttattatgtttagtttttatagttttttttaattttttgagtttgtatttggttatttttttgtttataaattttttttgttttttgttttttatatatatttagtatttattcgcgttatatagtgagtgtttatcgtgtgatataggttgttttagttgttagggggtttcggtgaatttaagcgttaggaatttttgtttttgtggagtttattttttagtgagttggtggggttatgagtaaataagtataaaagtattttattatgcgtgagaagatttgtatgggggtagtatgtaaaagagttaagagaggtcgggcgcggtggtttacgtttgtaattttaatattttgggaggtttaggtgggcgtattataaggtgaagagatggagattattttggttaatatggtgaaattttatttttattaaaaatataaaaattagttgggtatggtggcgcgtatttatagttttagttattcgggaggttgaggtaggagaatcgtttgaattcgggaggcggaggttgtagtgagttaagatcgtgttattgtattttagtttggcgatagagtgagatttattttaaaaaaaagagttaagagaattcggagttataggggcggggggagtgatggtagtagaggtggttagtatttattttggtgagaagtattattggagttaaggttatagggatgatgggaagagagttttaggtagagagaagggtagatggtaaggtttcgagggtaatatttgtttttggttagggtgggtttaggggagggggtttaggaaagggtatttggagatttaaagttgaaggttattttaaggattttggtattgtttttgagtaaaaatttggaaaggatttgagtagaagtagtatggttagatttagatatttagagagttattagggaggtggtgagaagtagttgatttttggatttatttttaaagtagaattggtaggatttgttgatggattggatgtggggtgcgagggaaagagaggagttaggatgatgttaaggaattttaaaaaaattattaggttgggcgcggtggtttacgtttataattttagtattttggtagttcgaggtgggtagattatgaggttaggagatagagattattttggttaatacggtgaatttcgtttttattaaaaatataaaaaattttttgggcgtggtggtgggcgtttgtagttttagttattttggaggttgaggtaggagaatggcgtgagttcgggaggcggagtttgtagtgagtagagattgtattattgtattttagtttgggtgatagagtaagatttcgttttaaaaaaaaaattattattggtcgggcgtggtggtttatatttgtaattttagtatatcgggaggttgaggtaggtagattatttgaggttaggagtttaagaatagtttggttaatttggtgaaattttgtttttattataaatatataaattagttggatgtggtggtgggcgtttgtaattttagttatttgagaggttgaggtaggagaattatttgaatttaggaggtggaggtcgtagtgagttgaaattttgttattgtattttagtttgggtgatagagtaagagttcgttttaaaaaataaaaaataaataaaaataaaataaattaggttaggcgcggtggtttacgtttgtaattttagtattttgggaggtcgaggcgggcggattacgaggttaggagattaagattattttggttaatacggtgaaatttcgtttttattaaaaatataaaaaattagtcgggcgtggtggtgggtgtttatagttttagttattcgggaggttgaggtaggagaatggtatgaattcgggaggtagagtttgtagtgagtcgagatggtgttattgtattttagtttgggcgatagagtaagatttcgttttaaaaaaaaaaattattattattattattattattattttattttatttttgatatggagttttgttttgtcgtttaggttggagtgtagtggtattattttagtttattgtaagttttgtttttcgggtttacgttatttttttgttttagtttttagagtagttcggattatagtttttcgttattatgtttagttaatttttttgtgtgtttttagtagagatggggttttattatgttagttaggatggtttcgattttttgattttgtgattcgttcgttttggttttttaaagtgttgggattataggcgtgagttatcgcgtttggttaaattattattaattttagagataaggttttgttatgttggttaggttggttttgagtttttggttttaagtgatttttttattttggttttataaagtgttgggattataggtatgagttatagtgtttagttaatattaaggaatttggtttgagtattcggtaggatgaagttgtttttaatggagaagaaatattgaagggtgagggaggatttggaggttattttagagggtgggatagagggggatttttttttttttttttttttgagatagagttttattttgttatttaggttggagtgtagtggtacgatttcggtttattgtaatttttattttttgggtttacgttatttttttgtttgagtttttttagtagttgggattataggtatgtattatgtttagttaatttttgtgtttttagtggagacgggggttttattatgttggttaggttggtttcgaatttttgatttcgtgatttattcgttttagttttttaaaatgttgggattataggtatgagttatcgcgtttggtcgttagaggtggtttttaagtatttggtgggatttttagtagggtgttagtgggagttggtagggatttggagtttgaattagagttgtgtttgttttagtttagttaggggtaggggttttaggtgtgtgtaaaggaaggaatggtagatgtggggtttaagttggttgagttttagggaagggagtaagttttgggaagtcgtagtatcgttggagttggggtttcgggggtatgatttatataggttgggttagttggtgggaagtttgggatggagttatttgatggtgataaggtttaggttatgtttttgggaatgagtttgaggggagagtgggataagattatggtagaaggagtagtaaggtatagaaaggagatagggtgttggtggagtggtagaggataggagtaatattttgtataggttagggacgatatttttttttagttttagttgtagattcgtaggaaagagggttgcgggagaagatagttgttaggtgaggatagagttggattttttaattttttgatttagtttttagtgtttttaaaagtaagtggttttttagaaaagattagtaagtgttagtgtttcgttagagttacggggtttttgttttttttatttgcgtagagtaatttatatttggttcggttattttttatagtttttgttattaggtttttttgttggatggttgaggtgtttttagggtagggattgtagttattttgtgttgtgatagtttatatagtttagtgtttgaaataggtgtggatagtggagaggtagaaagaagtagtttagtgttagtttttgggttagattgtagggtttaaacgtggttttattttttttagtaggttgagtttgagtaggttaattaattttatttgtttgagtttttttatttgtaaatgggaatagaattagttttatttcgtagggttgtggcgaggatttgatgagttaatataggaaaagtgtttggaaatagtgtttggcgtagaggaggggttaagtgtttgcggtttttattattagaattgttattgttattatttatgtatatatatatttatatataaatatatatatataatttttttttttaagatggagttttattttgtcgtttaggttggagtgtagtggtgtaatttcgtttcgtagtaatttttattttttaggtttaagtgatttttttgtttttatgtatatttttggttttatatatttataaagttttaaatttttgggttttagttatttttttattttagttttttaagtagttgggattataggcgtacgttattatgtttggttaatttttttattttaatttttgtagagataagggtttttttgtgttgtttaggttggtttcgaatttttggttttaagtagtttttttgttttggttttttaaagtgttgggattataggtatgagttattatattgggtttatatttttaagttatggataaaaatttaaagaattatattttgtaacgtgaatattttatgaaatttaaattttaaggtttttaaagaaagtgttagtggaatatagtaaggtgtagtgtatttatttatatattgattatggtttttttttagttttggttataaaggtgagtggttgttatagagattacgtggtttattgaattttttttatagaaaatatttttagtttatttaggaaaagggaaaagaaagtgaataaatatttgttaattaattttttatatttgtaattttagtattttgggaggttaaggtaggaggattatttgagtttaggagttcgagattagtttgggtaagatggtaagatatttttttaaaaattttttaaattaaaaaattagtcgggtatggtgatgtttgtagtttaagttatttaggaggttgaggtgggaagatcgattgcgtttaggattttgaggttgtagtaagttgagatcgtgttattttattttagtttgggtgatagagagagattttgtcgttgttttttaaaaataaaaaggaaatatttgttaattttagagtattttttgattttatgagttttgagtaaggttgggggtgttttttgtaggtttgaaggggtttttgtatcggaaggttatagttaaggttgaggtttataggtgtcggaggcggataggttgcgagtgtttgtttagggtggggtggtagtattggttattgtgttggttattgacgttagtttttttcggtagtagattgtgtgtggtcggtatgtggtaggggtaggatttaaatttagtttttgtttgatggtagagttttattgttttaaacggtttggaatattattgttttaattaagtgtgtaatttagtgtgtaagtgttttgtaattaagtgtgtttttgtttttttatttataaaatagggagaatttcgtatttttttttttgggaatttgaggattttgaaaattttagtgtagggatgttcgcggaagtattagtagggatgttcgttttagtcgttgatttagaagtttaatacgtagagaatgtaaagttagaggtgttatgttggggtttggggtatttttagttatagttattattttttatttttatatttagtttcgggttaggttttaggcggatggtaagagtgggtaggtttgggtatttatttacgtttatatttaaggaggagttatatttttttttttttttagagaagggagagtttggtttaggttttgttttagtttttttttttttttagggaatttatagatatttttttagggtttttttttgtaaatagaatattttttaaaaatttaatttagggttgggtatcgtggtttacgtttgtaattttagtattttggggggtcgaggtatttggattgtttgaggttaggagttaaagattagttcgattaatatggtgaaatttcgtttttattaaaaatataaaaattagttgggtatggtggcgggtatttgtaattttagttatttaggaggttgaggtaggagaattatttgaatttggtgagtagaggttgtagtgagttaagattatattattgtattttagtttgggtgataaagtaagattttttttaaaaaaaaaaaaatatatatatatatatatatatatatatatatatatatatatatatataaatatatatatatatatatatataaatatatgtatatttgtatttatatatatataatttaatttatataaatgggtattattttgataataattagtttggttaagtttacgaatttggtgaaaaatttttattttataggataggtttttggtagaattggtgttagtagaaggtttaaaggggttttttttagtttaggtttttaaggtagtttaaggtatagttggaaggagtttggggtatgatagttaagtatatagtttttgaagttatattggttgggttgggattttagttttgttatttattagattagtgattttgggtaagttatttatgttttttgttttagtttttttttttgtaaaatggtaattatgaggaatttttttgatagggtgtggtaaggattaaatgaatgaatatatagggagggttttcgattatttattatatttgtttagtgttttttgtttgttttgatttttgggtaaggggtagtgtttaggttaagtgtttgggtgtaagttatttattttttatttgtggggttttgtgttcggtaagcgtagtggttttgtggttttatttagagttagtggaggagaatagttgtcgttttttgcgtatttaggtggttaagtaggttgttttagttatacggttttaggtaagtttttaatttttgtttttgtttttttatttgtataatagggagagttggatatttatttggttgggatttttagaggttttaggttatgaggggttggtagggggtttttttgtttttatttgttgttatggcgattttggtagatggggaattgtttttattttatagaagatattggggttttaaagggttggagaatgggttaaggttagagtaggaatgtggttagggtttggtttatttagttgatttttgttttatagttatcgtattatagaattggaaattattttgtagataggtttgtttcgttagtgttttttttgttttcggtttttttgtttttattcgaaattttttagttttttaaggtgttgggattataggtatgagtcgttacgtttggttgttatttgtaatttttatttttgatttagtatgtttttttttattgttattttatttttttagggttttgaggtatttttatttgatttgggggtagttttgggttttggtgatgtttagaatgtttaggtattttgattatagtttattttattttaggttttttcggatttcgttttttcgtttttttattcgtttttttttttttttttttttttgagataaagttttattttgttttttagattgttagattggagtgtaatggtgagattttagtttattgtaattttcgttttttaggtttaagtgatttttgtgttttaatttttttagtagttgggattataggtttatattattatgtttggttagtttttttttttttttgagatagagttttattttgttatttaggttggagtgtagtggtgtaatttcggtttattgtaatttttgttttttgggtttaagtgattttttcgttttagttttttgagtagttgggattataggttcgcgttattatatttggttaatttttgtatttttagtagagatagggttttattatgtgggttaggttggtttcgaatttttgatttcgtgatttatttgttttgggtttttaaagtgttgggattataggcgtgagttattatatttggtttttttttgtatttttagtagagatgggtttttgttatgttgggttaggttgatttcgaatttttggttttaagtgatttatttgttttggttttttaaagtgttgggattattggcgtgagttattgcgtttatttgttttttttttttttttcgaggtagagttttattttgttatttaggttggagtgtagtggcgtgattttagtttattgtaagtttcgtttttcgggtttacgttattgttttgttttattttttcgagtagttggaattaaggcgttagttattatgtttagttaattttttgtatttttagtatagatggggttttatcgtgttaggatggtttcgattttttgatttcgtgatgcgtttgtttcggttttttaaagtgttgggattaaaggcgtaagttatcgtattcggttatttatttgtttttttagttatgtgttttatttatgtgttttagttgggatttttggaggttttgtattggtttataggttaggtttttaggttttttgaggggagaagagatattttaatggttatttttcgtttttagtttttggtttgtaatttattttttttaaagagtttttttgatagatatattttgttataaatatttagtatgtttttttatttgtttttttttttttttttttttttttttttttttgagatgggtgtagtggcgtgattttggtttattgtaatttttgttgtttaggtttaagcgatttttttgttttagtttttcgagtagttgggattataggtgtttgttatcgcgtttggttaatttttttgtatttttagtagagacggggttttattattttggttagtttggttttaaatttttgatttcgtgatttttttaatttcggttttttaaagtgttgggattataggcgtgagttattgcgtttagttttttatttgttttttattttgttattgtattttgagtgtttgtttaggggagtggttttaagtttttatcggtttgggtagaggagtggagttggtaggagttgggagatggtatagagtatagtttaaatagattatagtaggcgggtttttgaataataatttatagtgtatttgtagtttataaagtattttttttttttttttgttattattattattatttgagatagagtttcgttttgttatttaggttggagtgtagtggtataatttcggtttattgtaatttttatttattgggttaaagtagtttttttgttttagttttttgagtggttgggattataggcgtgaattattatatttaattaatttttgtatttttagtagagacggagttttattagagtttgaggttaggttggtttcgaatttttgattttaggtgatttatttgttttggttttttaaagtgttgggattattggcgtgagttattacgtttggtttttttttattaattttttaaattaatagagatggggttttgtaatgttgtttaggttggtttcgaatttttgaatttaagtaatttatttgttttagttttttaaagtgttgggattataggcgtgaggaattacgtttagttataaagtatttttatattttttaattttatgtgatgtttatatagttattgggagttagggttaggattatttttttataaaggtgaggatataggttaagagagtcgaaggttggttagataaggggagagatatagagtttcgttgattattattggattttggattttattaaatttttggaattttttagttttaggtttttatagttttatagaaattgggtaagttttaattttttaagtttttgtttttttatttaagtatgtttggtatttattttttagggtggttaggaggataataagggaatgtttcggtttatacgtaagtgtattattaatggtatttaaaaacgttaatagttttagatattgtttttagagaaggttttgtgggggatgcggatatgtagcggttaagtttttgttttttaggggttttgtaggttttttgtagaggaggtatttaattttgtcggttgtggtaggatatttttttatttaagggattggtttttttcgatgtagaatagatattatgaaatagttattaatttaggggttgttaggaggttttatgaaggttttgtattaataatattttttgtttttttttttttttttttgagaaaaaaagtttgtcgtttaggttggagtgtagtggcgtgatttcggtttattgcgattttttttttttgggtttaaacgatttttttgttttagtttttcgagtaattgggattataggtacgtgttattatgtttagttaatttttgtgttttgagtagagatagggttttattatgttggttaggatggtttcgattttttgattttgtgatgtaattagtattttttatgtttttattttgtgttaggtatagggttttatttattattggtattcggtaaggattcgtgggattaatgagaagttaatttaaatttttattaaaggtttttgagttttttttcgatttatatataagggattggggttttgagaggtgggttgtgatgcgtttttggaagatttacgagtgggtttgtagagttgatggggagggtttaggtagggttaggggtttagaggagttgagattaacgtcgtttttttatttattgattttttgtagg

SEQ ID NO: 12 - DNA, 17580 bp, Artificial Sequence
  chemically treated genomic DNA (Homo sapiens)
tttgtagagggttagtgggtaggggggcgacgttaattttagtttttttaagtttttggttttgtttgaattttttttattagttttgtaggtttattcgtgggttttttaggggcgtattatagtttattttttagagttttagttttttgtatgtgaatcgaggggaagtttaggggtttttggtgaagatttaggttaattttttattaattttacgaatttttatcgagtgttaataatgggtgaggttttgtgtttagtataaaataagggtataagaaatattagttatattataaggttaggagatcgagattattttggttaatatggtgaaattttgtttttatttaaaatataaaaattagttgggtatagtggtacgtgtttatagttttagttattcgggaggttgaggtagaagaatcgtttgaatttaggagggagaggtcgtagtgagtcgagattacgttattgtattttagtttgggcgataggtttttttttttaaaagaaaaaaaaaaaaagtaagaagtattattagtgtaagatttttatggggttttttggtaatttttgggttggtagttattttatagtgtttgttttatatcggaggaagttaattttttggataggaaagtgttttgttatagtcggtaggattgaatgttttttttgtaagggatttgtagagtttttggagaataagaatttggtcgttatatgttcgtattttttatagagttttttttggagatagtgtttggaattgttgacgtttttaggtattattgatggtgtatttacgtgtaggtcgagatatttttttattatttttttaattattttgggaggtgagtattaaatatgtttaggtgagaagatagaagtttagagagttaagatttgtttagtttttgtgaagttgtggaggtttgaggttggaaggttttaaaggtttggtggaatttagagtttagtgatgattagcggagttttgtgtttttttttttgtttagttagttttcgatttttttagtttgtgtttttatttttatgaggggataattttagttttgatttttagtggttgtgtgaatattatataaaattaaaaaatgtgaaagtgttttgtggttgggcgtgattttttacgtttgtaattttagtattttgggaggttgaggtaggtggattgtttgagtttaggagttcgagattagtttaggtaatattgtaaaattttatttttattaatttaaaaaattaataaaagaaggttagacgtggtggtttacgttagtaattttagtattttgggaggttaaggtaggtggattatttgaggttagaagttcgagattagtttggttttaaattttggtgaaatttcgtttttattaaaaatataaaaattagttaggtgtggtggtttacgtttgtagttttagttatttaggaggttgaagtaggagaattgttttaatttagtgggtggaggttgtagtgagtcgagattgtgttattgtattttagtttgggtggtagagcgagattttgttttaaataataataataataataaaagaaaaaagaaagtgttttgtaggttgtaagtgtattatgggttattatttagaggttcgtttattatggtttatttgaattgtgttttgtgttattttttaatttttgttaattttatttttttatttagatcgataaagatttagaattatttttttgagtaaatatttagagtgtaatgatagagtgagaagtaggtggggggttgggcgtagtggtttacgtttgtaattttagtattttgggaggtcgaggttggggagattacgaggttaggagtttaagattagattgattaagatggtaaaatttcgtttttattaaaaatataaaaaaattagttaggcgcggtggtaggtatttgtaattttagttattcgggaggttgaagtagaagaatcgtttgaatttgggtagtagaggttatagtgagttaagattacgttattgtatttattttaaaaaaaaaaaaaaaaaaaaaaaaaaagagaggtaggtagggaaatatgttgggtgtttatggtaagatatgtttgttagggaggttttttggaggaggtaaattataggttaggaattgaaggcgggggataattattggaatgttttttttttttttagaggatttgaggatttggtttgtgggttagtgtagggtttttaggggttttagttaggatatataaatgagatatatgattaagaaagtaagtaggtggtcgggtgcggtggtttacgtttttaattttaatattttgggaggtcgaggtaggcgtattacgaggttaggagatcgagattattttaatacggtgaaattttatttgtattaaaagtataaaaaattagttgggtatggtggttggcgttttagttttagttattcgggagggtgaggtaggataatggcgtgaattcgggaggcggagtttgtagtgagttgagattacgttattgtattttagtttgggtgatagagtgaaattttatttcgagaaaaaaaaaaaaagtaagtaggcgtagtggtttacgttagtaattttaatattttgggaggttaaggtaggtggattatttgaggttaggagttcgagattagtttgatttaatatggtaaaaatttatttttattaaaaatataaaaaaaggttaggtgtggtggtttacgtttgtaattttagtattttgggagtttaaggtaggtggattacgaggttaggagttcgagattagtttgatttatatggtgaaattttgtttttattaaaaatataaaaattagttaggtgtggtggcgcgagtttgtaattttagttatttaggaggttgaggcgggagaattatttgaatttaggaggtagaggttgtagtgagtcgagattgtattattgtattttagtttgggtggtagagtgagattttgttttaaaaaaaaaaagaaattagttaggtatggtggtgtgggtttgtagttttagttattagggaggttaaggtataagaattatttgaatttgggaggcggaggttgtagtgagttgagattttattattgtattttagtttggtagtttgggagatagagtgagattttgttttaaaaaaaaaaaaaaaaaaaaaagcgagtaagggaacgagaggacggaattcggaaaggtttagggtaagataggttgtgattagagtgtttgggtattttgagtattattaaagtttagagttgtttttaggttaggtggggatattttaagattttggaggagtgaggtggtagtggggagaggtatattaggttaggagtaaagattatagatgatagttaggcgtggcggtttatgtttataattttagtattttgggaggttgaaggatttcggataggggtaggagagtcgggaatagaaggggtattgacggaataggtttgtttgtagagtaatttttagttttgtggtgcggtgattgtggagtaggggttagttaggtgggttaggttttggttatatttttgttttgattttagtttattttttaattttttggggttttagtgttttttgtgaaatgggggtagttttttatttgttaggatcgttatgataataaatgagagtaggaaagttttttattagttttttatagtttgaggtttttgagagttttagttaggtgaatatttagttttttttgttgtatagatgaggaaatagaggtagaggttaagaatttgtttgaggtcgtgtggttgggatagtttgtttagttatttaaatacgtaggaaacggtagttgtttttttttattagttttgagtggggttataggattattacgtttgtcggatataaggttttataggtggaaggtgagtgatttgtatttaggtatttggtttgggtattgttttttgtttagggattagaataagtagaagatattgggtaggtatggtggatggtcggaagttttttttgtgtatttatttatttgatttttgttatattttattagggaggttttttatggttgttattttatagaggaagaaattaaggtagagagtataggtaatttgtttaaggttattgatttagtaggtagtagagttgggattttaatttaattaatgtggttttaggggttgtgtgtttagttgttatgttttaggttttttttagttgtattttgggttgttttggaggtttaggttggggaaggtttttttgggttttttgttagtattagttttgttaggaatttgttttatggggtgggagttttttattaaattcgtggatttagttaagttagttgttattaagatgatatttatttgtgtaaattgaattatatatatgtaaatataaatatatatatatttatgtgtgtgtgtgtgtatatatttgtgtgtgtatgtatgtgtgtgtgtgtgtgtatatatatatatatgtatttttttttttttagagggagttttgttttgttatttaggttggagtatagtgatgtgattttggtttattgtaatttttgtttattaggtttaaatgatttttttgttttagttttttgggtagttgggattataggtgttcgttattatgtttagttaatttttgtatttttagtagagacggggttttattatgttggtcgggttggtttttaatttttgattttaggtaatttaagtgtttcggttttttaaagtgttgggattataggcgtgagttacggtgtttagttttaaattgaatttttaaaaagtgttttatttatagggaaaaattttgggggagtgtttgtgaattttttgggggaaggagagggttggggtagggtttgggttagatttttttttttttggggaagggaaggggtgtggtttttttttgggtgtgaacgtgggtgggtgtttaggtttgtttatttttgttattcgtttagagtttggttcggagttgggtgtggaagtggagggtagtggttgtggttagaagtgttttaggttttagtatggtatttttagttttatattttttgcgtgttgggtttttgagttagcggttggggcggatatttttgttgatgttttcgcgagtatttttgtattgggatttttagagtttttagatttttaagaaggagaatacgaagttttttttgttttatagatgaggaaatagaggtatatttaattataagatatttgtatattgaattgtatatttaattaaaatagtggtgttttagatcgtttggagtagtgaagttttgttattaggtaagggttgggtttggattttgtttttattatatgtcgattatatataatttgttgtcgggggaggttgacgttagtggttagtatagtggttagtgttgttattttattttgggtagatattcgtagtttgttcgttttcggtatttgtaggttttagttttgattatagtttttcggtatagaagtttttttaggtttgtagagaatatttttaattttgtttagagtttataaaattagaaagtattttaaagttggtaaatgttttttttttgtttttaaaaaatagcgatagggtttttttttgttatttagattggagtggggtggtacgattttagtttattgtagttttaaaattttaggcgtaatcgatttttttattttagttttttgagtagtttggattataggtattattatgttcggttaattttttaatttaaaaaatttttagagaagtgttttgttattttgtttaggttggtttcgaatttttgagtttaagtgatttttttgttttggttttttagagtgttgggattataggtatgaaaggttggttggtaaatgtttgtttatttttttttttttttttttaagtgagttgaaaatgttttttataaagggggtttagtgggttacgtggtttttgtgataattatttatttttgtggttagagttgaaaggaaattataattaatgtgtaaatgaatatattgtattttgttgtgttttattaatattttttttagggattttgaaatttgaattttatagaatgtttacgttataaaatatagttttttggatttttgtttataatttaaaaatataggtttaatgtggtggtttatgtttgtaattttaatattttgggaggttaaggtaaaaggattgtttgaggttaggagttcgagattagtttgagtaatatagaaagatttttgtttttataaaaattaaaataaaaaaattagttaggtatggtggcgtgcgtttgtagttttagttatttaggaagttgaggtgggaggatggttggagtttagaaatttgaggttttataaatatataaagttaagaatgtatataaaggtaagaaaattatttgaatttgggaggtagaggttgttgcgaggcgagattgtattattgtattttagtttgggcgatagagtgaggttttattttggaaaaaaaaattatatatatatatttatatataaatatatatatatataaataataataatggtagttttaataataagagtcgtaaatatttagttttttttttgcgttaggtattgtttttaagtattttttttatattaatttattaggttttcgttatagttttgcgaggtgggattagttttatttttatttatagatgaggaaatttaggtagatggagttaattaatttgtttaagtttaatttgttaggaagggtagagttacgtttgaattttgtagtttggtttaggggttagtattgggttgtttttttttgtttttttattgtttatatttgttttagatattgggttgtgtgggttgttatagtataaggtggttgtagtttttgttttggggatattttagttatttagtaggggggtttggtggtagggattatgaggagtgatcgaattaagtgtgagttgttttgcgtaggtagagagggtagaggtttcgtggttttggcggggtattggtatttgttgattttttttgggaaattatttgtttttggagatattgaaaattaaattaaaaggttaagaaatttagttttgtttttatttggtagttgttttttttcgtagtttttttttttacgggtttgtagttggggttggggggaggtgtcgtttttggtttgtgtagaatgttatttttgttttttgttattttattagtattttgttttttttttgtattttgttattttttttattatgattttgttttattttttttttagatttatttttagggatataatttaggttttgttattattaaataattttattttaagttttttattagttgatttaatttgtgtggattatgttttcgggattttaattttaacgatgttgcggttttttagggtttgtttttttttttgaagtttagttagtttggattttatatttattatttttttttttgtatatatttgaagtttttatttttaattggattgagataagtataattttggtttagattttaagtttttgttagtttttattagtattttgttaaaaattttattagatgtttaaaagttatttttagcggttagacgcggtggtttatgtttgtaattttagtattttgggaggttgaggcgggtggattacgaggttaggaattcgagattagtttggttaatatggtgaaattttcgtttttattaaaaatataaaaattagttgggtatggtgtatgtttgtaattttagttattggggaggtttaggtaggagaatggcgtgaatttaggaggtggaagttgtagtgagtcgagatcgtgttattgtattttagtttgggtgatagagtaagattttattttaaaaaaaaaaaaaaaaaaaaatttttttttattttattttttagggtagtttttagatttttttttattttttagtgttttttttttattaaaagtaattttattttatcgggtgtttaagttagattttttggtgttggttgggtattgtggtttatgtttgtaattttagtattttgtgaggttaaggtgggaggattatttggggttaggagtttaagattagtttggttaatatagtaagattttgtttttaaaattaataataatttggttaggcgcggtggtttacgtttgtaattttagtattttgggaggttaaggcgggcggattataaggttaggagatcgagattattttggttaatatggtgaaattttatttttattaaaaatatataaaaaaattagttgggtatggtggcgggaggttgtagttcgagttattttggaggttgaggtaggagaatggcgtgaattcgggaggtagagtttgtagtgagttgagatggtgttattgtattttagtttgggcgatagagtaagattttatgttaaaaataaaataaaataataataataataataataataatttttttttttgagacggagttttgttttgtcgtttaggttggagtgtagtggtattatttcggtttattgtaagttttgtttttcgggtttatgttatttttttgttttagtttttcgagtagttgggattataggtatttattattacgttcggttaattttttgtatttttagtagagacggggttttatcgtgttagttaggatggttttgattttttgatttcgtgattcgttcgtttcggttttttaaagtgttgggattataggcgtgagttatcgcgtttggtttaatttattttatttttatttattttttgttttttgagacggatttttgttttgttatttaggttggagtgtagtggtaggattttagtttattgcgatttttattttttgggtttaagtgatttttttgttttagttttttaggtagttgggattataggcgtttattattatatttagttaatttgtgtatttgtagtagagataggattttattaagttggttaggttgtttttgaatttttgattttaagtgatttgtttgttttagtttttcgatgtgttgggattataggtgtgagttattacgttcggttaataataattttttttttgagacggaattttgttttgttatttaggttggagtgtagtggtgtaatttttgtttattgtaagtttcgtttttcgggtttacgttatttttttgttttagtttttagagtagttgggattataggcgtttattattacgtttagagaattttttgtatttttagtggagacggggtttatcgtgttagttagaatggtttttattttttgattttatgatttgtttatttcgaattattaaagtgttgggattataggcgtgagttatcgcgtttagtttaatagtttttttaaaattttttggtattattttgatttttttttttttttcgtattttatatttagtttattagtagattttgttagttttgttttaaaaataaatttagggattagttattttttattatttttttggtgattttttgaatgtttaaatttgattatgttgtttttgtttaaattttttttaggtttttatttaaaggtaatgttagagtttttagaatgatttttaattttaggtttttaaatatttttttttaaatttttttttttaggtttattttagttaggagtaggtgttgttttcgaggttttattatttgtttttttttttgtttggaattttttttttattatttttgtggttttggttttagtggtgttttttattaaggtgagtgttgattatttttgttattattatttttttcgtttttgtgatttcggatttttttaatttttttttttgagatgagttttattttgtcgttaggttggagtgtagtggtacgattttggtttattgtaattttcgtttttcgggtttaagcgatttttttgttttagtttttcgagtagttgggattataggtgcgcgttattatgtttagttaatttttgtatttttggtagagatggggttttattatgttggttaggatggtttttatttttttattttgtgatacgtttatttaggttttttaaagtgttggaattataggcgtgagttatcgcgttcggttttttttaatttttttatatgttgtttttatataaatttttttacgtatgataggatgtttttgtgtttgtttgtttatggttttattagtttattagaaggtaagttttataagggtaaggatttttgacgtttgggtttatcgaggttttttagtaattggaatagtttgtgttatacggtgagtatttattgtgtggcgcgagtgaatgttgagtgtgtgtggggggtagagagtaggggaagtttgtgagtagaaaaatggttaagtgtaagtttaggaagttaaagaaagttgtggaggttgagtatggtggtttacgttagtaattttaatagtttgggaggttaaggtgagaggattgtttgggtttaggaattcgagataagattgggtaataaagtaagattttatttttataaaaaataaaaaatgagttggtgtggtggtatgtatttgtggttttagttgttttggaggttgaggtaggaggatcgtttgagtttaggagtttgaggtttgtttgggtaataaaaggagatttcgtttttgtttttattttatgaaaatgtgaaaaatgttgggtatggtggtttacgtttgtaattttaatattgttgggaggttgaggcgggtggattacgaggttaggaaatggagattattttggttaatacggtgaaattttatttttaataaaaatataagaaattagttcggtatggtgatacgcgtttgtagttttagttattttggaggttgaggtaggagaattgtttgaatttaggaggtagaggttgtagtgagtcgagattgtattattgtattttagtttgggtagtagagtgagatttcgttttaggaaaaaaaaaaaaaaaaaaagaaaaagtaaaaaataaattaattgggtgtggtttatatatttgtatttttagttacgtgggaggattatttaagtttagaagtttcgggttgtagtgagttgagatcgtatttttgtatttttttttgggtgatagagcgagattttgttttaaaataaaataaaataaatagaaaaaaagaaagtaagttatggggtttaatttgagagaatcgagtgtgggtgtttattcgtaagagagcgaggggaaagaggttttttaagtttttttaattttgaaaatggggaggaggttttttaagttgtagtgttagagtgatatgatttagttttttatttttagagatggggtttggttatgttgtttaggttggttttgaatttttgggtttaagttagttttttgagttgttgggattatagatatgtgttattttatttagtttgatttggtttttgtgtttagaagatatttgttgttgttttaggtgttaaggttagtgttgggtataggggtgttagagtttattgagaaatggatatagaattttagtgtttatttttttattttggagtttgtgttttttattttatatagttatgttgtttgggaggattgtttgttttttgaggttatttgtttttggttattgtgttaggatagttttgttgtgggtacgagttatagggtaagaaagaatatatttgggagttggaaggtttaattttagggaaagtatgtagtttggggtagggtattaaggaggtttttagtttttatattttaaggaaagaaatattaggaaggtgtggttttaggtaggttttttttttttttcggattattgtttgtttgttattgatttttgttttaattttatattaatagttgttatatatatatatatgtattttaagagttggagtttttttaagttatttaggttggttttgaatttttgggtttaagcgatttttttgttttggttttttaaagtgttgagattataggtgtgagttattacgttcggtagtaattattttttagttttaatgtgtattagttttgtaattaagtgtattttatatgtttttgttaattaatttaatagttttataatggtggttattaattgttgttttacgaaagaggaaattggggttttgagagtttggggatcgatttaaagtatttagtgtttgtggatgtaattgggatgtagggagttagtgggttgggggtgaggtgtttcggtaggtggaggtggtggggtatttatttttatgatggttgttgttggttggttgtttttgttggtgattggcgttttataggaggtttggggtttggcgatgatgtttgtcggagtttgagggttcgttttttgcggggttggggtttaggtttttttttgtagagttggagtttttttgtttattcggtttaaattttgggatttggaatatgttttgggttgtgaggataagatgttacgtagttaaggtatagttggggttaacggtggttttggaaggtagaggtaggtatttttggtttttttttttatcgtagcgtttttaggttcgttaggttttttgggtttttatttgtttgtcgggtttggtttggtagggagttgaggttgtcggtttaggattttagtttttttttagaatttcggtggatttaggtttcgtttcgttcgtggtgacggcgtataggttttattttaagttcgatttcgaggtttttgattcgggtttgtcgtttttttttagtatttcgggtttcgggttttagttgtttgggtaacgggaattgttagcgatttggtttaattatttttcggaacgttattcgggtaggtttagaggcggggttaattcggttcggtttcgttttttcgtcggatttaaggtttttcgttcgtagttttttttttttttttttcggtttcggggtttatattttcgttgttttatattttgggcgtgtgtgggagtaggagagggattttttggggtttttatttggaatttggagatttatttttgttaataagttttttagtttttttgggttttagtttttttttagtgaagtggggatagtgatagttttttcgggagttagtgaaaattttgtgaagggagtgattattgcgggcgaaggcgtttggtatagttataattgaagtttagtcgtcggatgtgattattgttgttattgttatcgtttcgtttggattgggtgttcggtcggaaagtttcgtttttcgtttttttttttaggcgcggaagtttcgcgtcgttcgtttcgggggatatttttcgcgttatttcgggggtattggagataaggaaaggaattttttttttggttgggatggttgttcgggcgcgggaggagggtcggggattcggtgagggaggatcgtagggttcgtgggggttttacgtttggtaggcggtcggttaggtgagtagggtcgcgggcgcgtcggggcgaggggcgggttcgcgcgggggattcggggtttcgcgggtttaggttcgggggcggggttcgggggttattttggttatgggcggaagttttttttagagatcgagggacgggaattcgttgtcgttttcggtcgggcggtacgatttcgatttgggtataggagagacgagcgtgggaattggcggatttttatataagtaaaggcgggcggtacggggtacggtttattcggggattttttggatgcggtacggttttcgtaattcggtcgttcgtttgtcgtttttcgtaatttcgggcgttcgttagcggcgtagttcgcgttaattttcgtacggttttacgtcgggtgcggcgttggattgcggatttagtcgggtcgttgcgtaatttgcgtagcgaacggcgttcgcgtaggcgcggacggggaagggggcggagtagcgggagtcggggagtcggagtttcgggtttttacgatttgagtcggtttttttattagcggtttgaggatttggcgttcgttttttttttttttttgaggttggagcgtggacgcggtgggggagggtggggcgggggtagttttcgagaattacgaggataggaggtagaggttttttttattcgtattattggaggagagagagttttttttagtttggggagggggagagcggggtattgggcgtttttcgtagcggtcgttgttttgattcgacgggtattagtcggttttttttttttatttaggacgatatgaacgatcgaggttagggagttttttttttgggtttttgtatttttttatttttggttttggggtaggtttagggaggagatatttttaatttttattcggtttgttttggagaaaagagattgtttttttatgtttttgagtgaggggtttggggtttaggttgtttgtgttttttaagggtaagggtttttttgttgaggaggaggggtttgttagttataatttttttttttttgagcgttttatttttttttttgtattttgtaatttttattttttcgtatttatttttttggtttcgtcgatagtttttttttgtttgttttcgggatttaggtttttttttttgatatggagagtaatttgtttggtttggtgtttgttgtcgggttggtgtttgcgttgttatttgttgtgattttggggttgatagttgtttatattattttgtatgttttgtttttttttttcgtttatgtttagttttggttggtgtttttgtatgggtataagcgttttagttattagacggtgtttttggttttttgtttgttttgggtcgttttgcgtattatttttttttttttttattttcgagatatttttcgcgttaatcgtttggggtttttgtttttttggtttttttattgttgtttcgtttgtttgtagttttttattttgacgtttatgaatttttattttgtttaggtaattaattgtggtttcgggtggggggcgggaggtggtaagttttaaggatttataggagtgaagggtatttttgtttttaggtggtgtttaaggttaaggtgaagcgtcggtcggagatgagtcgaggtttgtaagtattcgggatattggtgggtttagtttttaggttaggggtaggtgatagttttatgtagatttttttttattttttagggttgagataaaggtaatttagggaatgtttgtggaagattttggaaaagttaaagtatttggcgtagatggtttagtagaggttttgtagatttgtaaggtataggaataggaatgtttgtggtagtgtgagggagagggttttagtgttatttattatggagggcgagttggaggttttagtttatggaagtattaaagttatatgtatttttgggtgatttggggtcgtaatgttttcgttatttgtatagtgttttacggtttataaagagtttttttagttattttttatttgtataatttttttgagaggttattatttttttttgagagatgaagaaattgaggtttagttaggtaagatagtaggattaaggtcgtagagttggggtttagatagagatttttgattttagttggtgtatttttcgaagtattatggttgttagttattttttgatttttttgggttttagtttttttatttgtaagagtggaggaatagggtttagattggatgttttgagttttgtcgatattggggttttttgtaggaggtggggtaggtggtgagtgttgagggttgttgagggttcgcgttgattgtgttgtggttgtaggttcgttgttcgaggggtttttgtgggggtttcgttgttttttttgttggtgaacgtgttgtgtgttgtgtttttttatcggcgtcgggtatagttttgggttttgttgtttgttcgcgttttggtgagcgattttttgttcgttatttgcgcgttgttttttgttgtttgtttttgtttcgtcgttaggcgggcgttttttattagtatttatttggaggttaaggtagggttgtagtattgatgtttaggtgttttttgggtttttcggtagcggtttttagggtgtagaggaagttgggagttttttttttttgagggttttttgttgttatttgtgttaggggattagtgtgtgttaggcggtcgcgatgggtggcgttatggttttgttttatgttagtcgggtttgttataatttgatagtattggttttggttttttagagtcggttggatattttcgattacgattggtataatgtgtttgattaggtgggtatacgtatgtttgttatttttttagtagtcgtggtattttggttttagttggtttgggttttgttttattatttttttggcgtgattgtagattggtattagtttttgtttttttataggcggatttggtgaatgatttggggaataaaggttatttggtatttggttttatttttttcgtgtgggagttattgtttattattttgttggtgggtttttttcgggtgtatcggtttttataggatttggtaagggtttgtttttttttttgtggggttagtggagggggcggatgttgtaaattttgggttggagtttggggttgggtttgggaggttagtgtaggataggagtaagtatcgatgatggtttttttttttagagtattagttatatttttaatgggtaggtttttgtttttcggttttatttttttgatcgggttgggtattgtgaagatgagggttgtttttgggagtatagtcggggtgagagtattaggtaggagtcgtggtattgttttagtatttttgttttattcgtttatttcgttggttttattaagttatgggggatcgagatagtcgggttttgttttttatttttgttatggtttttgtttttttatttgtattaggtgaggttttttgggtttttattgttaaagtttttattttttgtttagagatgtattttgttttgggtttcgaaggtttaggttataggggttttgttttaagtttgttttttttttgtagtttttgtgattgtggttttggttattgttttgagattgattttgtttttttgttgtagtatgtcgggtagtttaggttttgggagttggtatggtgttatcgggcgtgagtcgggttggtatgggggtagttagacgaagattatttttttgttttttttttaggtgttaggattaggcggttattattatagtttttattttattttatagacgtgattttttttttttttttatagaatatttaggttttagttttttttattttaggtttttgtgttaagtttgtttgtcgttttttgtttaggattttgggggtcgtggttatttttttttttggtcggttttttgttgtttttgttatagtgagtttgtgtcgtttttttaggat

SEQ ID NO: 13 - DNA, 6314 bp, Artificial Sequence
  chemically treated genomic DNA (Homo sapiens)
atgtatttattaaaattagttttattaggttatatacgtgaaaaagttgtagataaattttaatattaaataataaaaaatgtaatgggttgttgttattatttagagtataagagatgtttataaattaatatatattaaattgattaatgttttttaaaaagtttataagtgtttttttatttcgaagtagaattaagtgtttttttggggagagaggaaaaaattttttaaatgaaaattgataagtttagcgagtatttaggataataattaatagtttaagttgtattattttttcggttaatgtatttaatgtgaagtttaagtttattggaaaattgaaaaaagtagtatagtaacgcggatttagataatattagtagtgaaaagaattagagtagtgtggtagagtgggaaaaggatagggcgtggtattaggaagtttgattagttggttttagatttttatgttggttttttttttttttttttttttttttttttttttttgagatagagttttattttgttatttaggttgtagtgtagtggtataatttcggtttattataatttttgttttttaggtttaagcgatttttttgtatcggtttttttagtagttgggattataggagtttgttattatgtttggttaatttttatatttttagtagagatggtgtattattatgttagttaggttggttttaaatttttgattttagatgatttatttatttttattttttaaagtgttgggattataggcgtgaattatggcgtttagttaaagatttttatgtttgatatttaaattattttatgttatgttagtttttatatttgtaaattgataaatttaatttagatgattattattttatttgtagaattattttgtttttaaaagatgagtttttattttatattttgtttgtaattatagaaggttttaaataaaaatataatgttttaggtatttaaaatgaagattaataataagttagagtagaaatttaatgtttattgagggggtatgtgttgttttggggtttagatatatagtagagaatgagatttagaaagttattaattttatgaatttatatttatgttggaggaggataaataaataagaaaataatttattgtgattaggataatggaataataaattagtaaggtagtatgatgaagggagagaagtggttatagaaggaagggtggtaagggaaagtttttttgaagaggtgattttgagttgatattgaagaatgaaaataagttagttattagcgtatttagtaaaattttttttattttatgtttaaagtattttttagatgtagaatagaggaaaaatatagtgattttgttttgaaggaatttatatttttttttgcgttataaataagtattatagaaagtaaattttaattatatgagattatagagagagaaattgtatttttgaaggaggtattagagttggattttaaaaggtagataattttagggtataagaagagtgataggaagggggcggggggggagaaggaaatttgtaaattaaagaggaggaaaaaagggttatatatttatgtttagttaaaagttgagggtgtgaagggaaagaatagtagataaagttagaaaagtattgggcgtaggttgtatttggatttgattttatagggaataagaaaatattaagtgatggagtttgtttattgagtttgtataagtgggtatgtgtgagagggtggggtgttgaagatgtgaggtaaagatgtaggagttttatgagatattataaaattatttattaagagttgggaataaaagtagtaagtttagggtgaaggttattagttttttgtgattttaaagtgttattaggatatttaatagaaatatacgtagatagttggaaatagtaagattggaaaattaaagatattaagattagagaaagtaattttggataaatttataaagaggtgatataaaaaattaaagtataggagatttattaaagatttaaagaagtaggttatatgtaatttaagtgattatttattttggagaatagtaagagttagagaagtaagaaaattattaagtattagttgttagagaaattaagagaagagaattaaagaatttggtggggagagtattatagtgttgtaaaggggagagaatatagaagaagattttagacgaataattttgaagaatgtagtttgagtaattttaggataaaaattagattgtaggagtaatgtaagtagtttattgaaggtgattaagaaatagataaaatgaaaatgattcgaggtttggggataaagatatgaaaaaagggatgggtatatgaagagaacggagaaaatatttgagatggatagatagtaatatatgaggggaagaacgtaggggttggggagatagaggatataaaagaaaaaggttaataacgaaaaaaggttttagaagtagtgagaggagatagtaataatagatagataaaaagggaggaattttttttatttaaattaaaggatgggtgaaaatatagaaatataaggaggaaattgtgtgttagggttggggagtaaagggtgtatattaaatggttttaaagtttttataaagtagggggtttggaatttataaagaggtaggggttagagggttaaagagtaaaattgatttttagtaaaatggtaggatgtgttagaggatatataaggagagatgagggtaaaagagtattttcgagtaattaaaatattttgttatacgtaataggtttatatagatgttaatatatatttagtttaattatattatattttttttatatagtataataagtaatttgtgtttaaaaaaatgatttgtcggtcggaggcggtggtttacgtttgtaattttagtattttgggaggtcgaggtgggtggattatttgaggttaggagttggagattagattgtttagtatggcgaaatttcgtttttattaaaaaatgtaaaaattagttgggcgtgttggtaggcgtttgtaattttagttatttgggaggttgaggtataagaattgtttaaattcgggaggtggaggttttagtgagtcgagatcgcgttattgtatattatagtttgggcgatagagtaagattttgttttaaaaaaaaaaaaaaaaaaagaaaagaaaagaaaaaagatttgttaattataaaatgattttttttttttttttgagacggagttttgttttgtcgtttaggttggagtgtaatggtgcgatttcggtttattgtaatttttttttttcgggtttaagcgattttttcgttttagtttttcgagtagttgggattataggtatcgttatagtgtttagttaattgtaggaacggggttttattatgttggttaggttggttttgaattttcgattttaggcgatttgttcgtttcggttttttaaagtgttgggattataggcgtgagttatcgcgttaggttcgtaaaatgaaattttaattatagattttaaattgcgtatttatagagtaattgagacgattgtaatttatttaaaattatgtgtaaattattttgaaataagttaatgagaaagattatatgattaaaataataaaaaatgttgtttgaggaataatgtatagacggaatttagaaaaaaggaaagttagaataattgtagacggtttttttcgtttttgtataggattgagtttttttttcggataaaaattaggaataagggaggtttttttagtaaaagtaaaagtaaattgttttaaaaaaaaaaaaaaggttgtaagtgatttggtttttttagaaaagttaatattatgtttaatagtggtttttattataataatttgaaggtgttaatgatttttatagtaaaataagttagtaaatggttatatcgtagagcgtttatatttattgttaattaagtttaattgtcgttgttttaatattttcgttttttaatgaattttttttttaggtatttcgatttatttatcggtaatacgttgatatttcgaaatattgtaggtaggagtggacgggggagaagtttttttttttttcgggtttttttcgtgttcgggtttttgttgtcgcgatttacggaagtaagaatgagttttatcgtttggggtttattagttagagggttggcggaggttgcgaggggtagaagtagtagtaggttattgggtgggtaagcggtgtgtatcgtagttgtggaggatatcgacgcggaacgttcggattgagtttagaatatatcggtttcgttcgggatttattttataagttttttcggaagaggcgttcgttcgggaggaagggtttaatttcgggttttatcgggaggagataaattatttattgttaatgttttcgatgaggttggcggtgttaggtatatagtttattttgaattgaaataatgttgtaatgtatagcggcgggaggttagcgcgtttaaaatttttttttttttatcgtagtcgtcgtttcggtgggattaagttcggaatttcgatcgagattagtatttttgtttcggtttttagtcgtcgggggttgtcggaagtttttttatattatttttatttattttttgtaatacgtgtgggtttttaggaagaggcggggtagtcgtatcgttgggggatattttttttttgtttttgttaagtaggtaagaggaaattttattggataaatggcgaggaaacgtatatttttttttaaggaatacggtgttttttttcgttttcgggttttcgagattttagagttattgattttcgttttttagttttcggggttcggtagtagaaggggcgggttcgggtttgggattggttggcgtcgttcgatttttttcgttgttttttattcgtaatcgttcgcgggcgtttgcgcgatgggtcggtcgtggggagcggggcgggaagcgttttagggtagcggattttatgtcggttttgaggcgttcgggttacggttttagtgacggttcgttttacggtcgttattacgggtttgggggtggagatgtgtcggtatatttatttttatttttatatttttttcgttttgaatttttttagttttttattttttggcgggtgcgcgggggcggttcggcggagattatttggttgggagaaggcggaggaggcgatggttattatttttcgggaggcgtttggttagagtttggtcgagtcggaggaagttattaggtaagttttgtattttttgtttttgcggggaggtgagggtttttggggttggggttcgtaaaggatcgggttttatatttgttttttttatgtggaggagggtgtgttgcggggggtgttggagagatcgagattaagattagaggttggggggatatgtttgtgttttttttgtttttttttttttgtttcgattttaaaaaatatgtttattattatttaaaaaagaaagattttgcgcggatttattaagtttagtagtaggttgtagattttttttttgggagcggtgttgggtaggggtggtacggatttattgttttagttttagtaatttattttgcgtggttggtaggtcggttttttcggggaagggaagtggttgtagttttcgatgtcgtttagggattttttcgaggggaaggaatttttgcgaggaggagggatttgggtatttagttgtttgtttttaatgttttgtttgagatcgaattatgaataattagtgttgtaaagtatttttacgcggattgattgatttaatttttacggcgattgtaaggtaaaatggtattatagcggtttttttttttgttttcgaataaggaatcggggttttgcgaggttaatttatttgtttaatatatttggatttgtaatattttatttttcgtttttttgtcggatatatatttttgttttgttaatatagttttttgggtagtgggttgtcgttttgcggtggtagtatatttttttgttcgtttaagaattatttttatttgttgaaaatgtaatagtgaaattttcgtatattgttggtggggatgtaaaatggtggaaaatagtttggtagttttttaaaatattaagtattagaattagtttatgatttagtaagtttatttttggttatatatttaagaaaattgataacgtatgtttatataaagtttgttcgtttatgtttatagtattattatttataatcgttaaaaagt

SEQ ID NO: 14 - DNA, 6314 bp, Artificial Sequence
  chemically treated genomic DNA (Homo sapiens)
attttttggcgattatgaataatgatgttatgaatatgggcggataagttttatgtgaatatacgttattagtttttttgggtatatagttaggagtgggtttgttgggttatagattaattttaatgtttaatgttttgaggaattattaaattattttttattattttatatttttattagtaatgtacgagaattttattattatatttttaataaatgaggataatttttgaacgaatagagaggtatgttgttatcgtagaacgataatttattatttagaagattgtattaataaagtagaagtatatgttcggtaggaaaacggagaataaaatgttgtaggtttaagtgtattaggtaagtgagttaatttcgtagagtttcggttttttattcgaaaataaaaaaaagggtcgttgtaatgttattttattttgtagtcgtcgtgaaaattaaattagttaattcgcgtaaaggtattttataatattgattatttatgattcgattttaggtaaggtattaggggtaaatagttaaatgtttagatttttttttttcgtaaaggtttttttttttcgggagggtttttgagcggtatcgggggttgtagttatttttttttttcgggagagtcggtttgttagttacgtaggataaattgttagagttggagtagtagattcgtgttatttttatttagtatcgtttttaggagagagatttgtagtttgttgttaagtttagtaagttcgcgtaggattttttttttttaaatggtaataaatatattttttggggtcgaagtagaaaaggaggggtaaagggaatataagtatgtttttttaatttttgattttagtttcggtttttttaatatttttcgtaatatatttttttttatataaggaaaataagtatgaaattcgattttttacgaattttagttttaagggtttttattttttcgtaaggatagagggtgtaaagtttatttggtggtttttttcggttcgattaggttttggttaggcgtttttcgagggatagtagttatcgtttttttcgtttttttttagttaggtggttttcgtcgggtcgttttcgcgtattcgttaggaaatgggaggttggggaggtttagggcgaagaggatataagggtggaggtgggtgtatcggtatatttttatttttaggttcgtagtagcggtcgtaggacggatcgttattggggtcgtagttcgagcgttttagggtcgatatgggattcgttgttttgaagcgtttttcgtttcgttttttacggtcgatttatcgcgtaggcgttcgcgggcgattgcgaatggagagtagcgaagggggtcggacgacgttagttaattttaggttcgggttcgttttttttgttgtcgaatttcgaaagttgagggacggaggttagtgattttggggtttcgggaattcggagacgaaggaagatatcgtgttttttaagagggagtatacgttttttcgttatttatttaatggagtttttttttatttatttaataggaatagggaaagggtgttttttaacggtacggttgtttcgtttttttttgggggtttatacgtgttataggaagtgggtaagggtaatatggaggagttttcggtagttttcggcggttgaaagtcggggtagaagtgttggtttcggtcgggatttcgggtttggttttatcgaggcggcgattgcggtaggagggaagaggttttggacgcgttggtttttcgtcgttgtgtattgtagtattattttagtttaaaatgaattatatgtttggtatcgttagttttatcgaggatattgatagtgagtagtttattttttttcggtggagttcggggttagattttttttttcgggcgggcgtttttttcgaagaagtttgtagaatgagtttcgggcggggtcggtgtgttttgagtttaattcgggcgtttcgcgtcgatgttttttatagttgcggtatatatcgtttgtttatttagtagtttgttgttatttttgtttttcgtagttttcgttagttttttagttggtgagttttaagcgatggaatttatttttgttttcgtggatcgcggtagtagaggttcgaatacgaaagaagttcggggagggggggggtttttttttcgtttatttttgtttgtagtatttcgaagtattagcgtgttatcggtggatggatcggaatatttagagagaggatttattaaaaagcgaaaatattaagatagcggtagttggatttaattggtagtaaatgtaggcgttttacggtgtggttatttgttagtttattttattgtgagggttattagtatttttaggttattgtagtagagattattgttagatatggtattgatttttttggaaagattaaattatttgtaattttttttttttttttaagataatttatttttgtttttattaagaagattttttttatttttggtttttgttcggaagaggagtttagttttatataaaagcgaaaagaatcgtttgtagttgttttggttttttttttttttaaatttcgtttgtgtattattttttaagtaatattttttattgttttaattatgtgattttttttattaatttgttttaagatgatttatatatagttttaaataagttgtaatcgttttagttattttgtgaatacgtaatttagaatttatggttaaaattttattttacgggtttggcgcggtggtttacgtttgtaattttagtattttggggggtcgaggcgggtagatcgtttgaggtcgggagtttaagattagtttagttaatatggtgaaatttcgtttttataattagttgggtattatggcggtgtttgtaattttagttattcgggaggttgaggcgggagaatcgtttgaattcgggaggagaaggttgtagtgagtcgagatcgtattattgtattttagtttgagcgatagagtaagatttcgttttaaaaaaaaaaaaaaaattattttatggttgatagattttttttttttttttttttttttttttttttttttttgagatagagttttgttttgtcgtttaggttgtagtgtgtagtggcgcgatttcgatttattggaatttttatttttcgggtttaaataatttttgtgttttagttttttaagtaattgggattataggcgtttgttagtacgtttagttaatttttgtattttttggtagagacgaggtttcgttatgttgggtagtttggtttttaatttttgattttaggtgatttatttatttcggttttttagagtattgggattataggcgtgagttatcgttttcggtcgatagattatttttttaaatataaattatttattgtgttatgtaagggaaatgtagtgtaattggattaaatatatattaatatttatatgaatttgttacgtgtaataggatgttttagttgttcgaggatgtttttttgtttttatttttttttatatattttttaatatattttgttattttattaaaaattagttttgttttttggttttttaatttttatttttttgtagattttagattttttattttatgaaaattttgaagttatttgatatgtattttttgttttttaattttaatatatagttttttttttgtgtttttgtatttttatttattttttaatttgagtaggaaggatttttttttttttgtttgtttgttgttattgtttttttttattgtttttggaattttttttcgttgttagttttttttttttatattttttgtttttttaatttttgcgtttttttttttatgtgttattgtttatttattttaaatatttttttcgttttttttatatgtttatttttttttttatatttttatttttaaatttcgagttatttttattttgtttgttttttgattatttttaatagattatttatattatttttgtaatttaatttttattttgaaattatttaagttgtattttttaaagttattcgtttaaggtttttttttgtgtttttttttttttgtagtattgtgatattttttttattagattttttaattttttttttttgatttttttaataattggtatttggtgatttttttatttttttggtttttattgttttttaaaatagatggttatttggattatatgtggtttatttttttaaatttttagtagattttttgtattttagttttttatattatttttttgtagatttatttaaaattgttttttttaattttgatgtttttggttttttagttttattgtttttaattatttgcgtgtgtttttattaagtgttttgatagtattttagaattataaagagttaataatttttattttgagtttgttgtttttatttttaatttttggtaaatagttttgtgatgttttataaaatttttatatttttattttatatttttagtattttatttttttatatatatttatttatataaatttagtaaatagattttattatttaatgtttttttgttttttatgaagttaaatttagatgtagtttgcgtttagtatttttttgattttatttattgttttttttttttatatttttagtttttagttaaatatggatgtatagtttttttttttttttttttaatttatagattttttttttttttttcgttttttttttattattttttttgtgttttaaaattatttattttttaaggtttaattttgatattttttttagaaatatagtttttttttttgtagttttatataattaagatttgttttttgtggtatttatttatagcgtaaggaagagtataaatttttttagggtagagttattgtgttttttttttgttttgtatttagaaagtattttaggtatggaatgaaagaaattttgttgggtgcgttagtaattggtttatttttattttttagtgttagtttaaagttatttttttagagaggtttttttttgttatttttttttttgtaattatttttttttttttattatattgttttgttagtttattattttattgttttaattataataggttatttttttatttatttgtttttttttaatatgaatataaatttataaggttggtgattttttaagttttattttttattgtatgtttagattttagaatagtatatgtttttttagtaaatattgaatttttgttttagtttattattagtttttattttaaatgtttgaagtattgtgtttttatttaaagttttttatggttataaataaaatgtgagatagaagtttattttttgaggataaaataattttataaataagataatagttatttagattaaatttgttaatttatagatataaaaattgatatgatatgagatggtttaagtgttaaatataagggtttttggttaggcgttatggtttacgtttgtaattttagtattttgggaggtggaggtggatggattatttgaagttaggagtttgagattagtttagttaatatggtgatatattatttttattaaaaatatgaaaattagttaggtatggtggtaaatttttgtagttttagttattaaggaggtcgatgtaggaggatcgtttgaatttgggaggtagaggttgtagtaagtcgagattgtgttattgtattgtagtttgggtgatagagtgagattttgttttaaaaaaaaaaaaaaagaaaaaaggaaaaaaaaaaaattaatataagggtttagagttagttagttaggttttttggtgttacgttttgttttttttttattttgttatattgttttgattttttttattattgatgttatttaaattcgcgttgttgtgttgttttttttagttttttaatgaatttgaattttatattaaatgtattggtcgaggaagtggtatagtttaaattgttaattattattttaaatattcgttgaatttgttagtttttatttaaaagatttttttttttttttttagaaaagtatttggttttgtttcgagatggaaggatatttataggttttttaagaagtattgattaatttggtatgtattaatttatggatattttttatattttggataataatagtagtttattgtattttttgttatttaatattgaaatttatttgtaatttttttacgtgtgtgatttagtaggattgattttagtgagtatat

SEQ ID NO: 15 - DNA, 7558 bp, Artificial Sequence
  chemically treated genomic DNA (Homo sapiens)
gagttgtgggtggggttgttttgttttttttagtaaatgtttattgtgtgttatatatcgttttgggtattttataaagagtattttagtttatttttgtaattttttttaaggatagttattattatatttttattttaaagacgaggaaatagacgtagagaggttgagtaagttgttatttatcgtacggtttagtatgttagaattggtatttgaatttaggtagtttgattttagtagttttttaaaatgtgtttcgtgttttgttaggttttatatttttaagaagttttataggaagagggttcgtttttggcgttttttttatgtttatggttattatatttatttttaagtagatattttttttttttggtggagggtttagggttgattttacggggttttgtggttttttgtaggtattttttttttaattgtaggatttggataaagtggttgttaattttaaagtatagttaggtgagggaggtaggtggggtttagagatgtgatagagattttttaaattttttttaaggtttatttataggtttgttggttttttgtagttttttttttttattagttttttgttttgtatttggggtttttattatagagggggattatcgtttttaaaagtagggtgatgagggggtggggaatagagagaggtgggtttttgtttttataggggatggttgttaggtttgtagaaggagttgggagtaataggatttttcgtttttttggttttggtatattttttttttattttttagtttgtttttttttatatttggtattttttatttataattttttatttgtgggaggattttattttttttttttttttaaattaaatttttatttttagttttttttttattagatgtttttgttcgttggttttatttatatttttttgtttttttttattaggtgttttgttttagatttttatttatttaaggtttttttttttagattttttttagtatgggttttttattttaggtttatgttttttttttattttatgtttaggtttttttttagtatttttgttttaggttttgttaatttgggtattttttaattttagttttttatttgtttgaggtttttgtttttttagaggcgttttttgttggttttttttttttttttttaggtaggttgtttaatattttttggtttgttatgggtagaattgattttattttttcgttaggtttttttgtttttgtaggtgtaggttattatacgttttatgtttagttttaagggaggttgttgtgatcgttttgagaagtttttgggtatggttatagagaaggggtggggcggtaaggtagatggtttcggtttttttttttttatatgttttttttggtttattattagggaaatggtattttggtggcggaatatggaggagtagtttgaaatttatgattagggtttcggagttggggtttttattttgagaaggtttttaatttagattttgtaatagttattttaggattaattgtttaagaataggaagagtttttaaattaaaatttttagttggaaattttttagaattttgggaagtaaagattggggaggatgggaggttgggggagattagttggaggtagagggggtaggggtttgatgaagtagggaaggaggtgtggggggtaggtagggattttgggggaaagggggtggagatttggaggaaaagatgtgagagttttaggaagtttggtagggagtaaatagggagaggtagggagggaattgaattttgagggtaggggttattgaggattgtatatatttttgttttttttgggtttgttttgtttttaagaatatttttagtagttagatagtatttgtttttttttttagtatttaggttttgtgtttaggtggtagtatagattttattaagtttatttatttatttgtttttatttttatttatttatttttttgagatagagtttcgttttgtcgtttaggttggagtgtagtgggttatttcggtttattgtaagttttgttttttgggtttacgttatttttttgttttagttttttaagtagttggaattataggcgtttgttacggcgtttagttaattttttgtatttttagtagagatggggttttatcgtgttagttaggatggtttcgattttttgatttcgtgatttattcgtttcggttttttaaagtgttgggattataggcgagagttatcgggttcggttttgtttttatttttatttttaattttttgagatggagtttagttttgtcgttaggtaggagtgtagtggtataattttggtttattgtaattttcgttttttggttttaagcgatttttttgttttagttttttgagtagttgggattataggtattcgttattacgttcggttaatttttgtatttttagtagagatagggttttattatgttggttaggatggtttcgattttttgattttgtgatttatttatttcggttttttaaagtgttgggattataggtatgagttatcgtgttcggttttatttttattttatttttttgagatggggttttatttttgttatttaggttggagtgtagtggtataattttagtttattgtaattttcgttttttgggtttagtaatttttttgttttaattttttaagtagttgggattataggcgtacgttattataatcggttttattttatttatttattattattattattttttgagatggagtttcgtttttgttgattaggttggagtgtaatggcgtaatcgtagtttattataattttgtttttcgggtttaagtaatttttttgttttagtttttagagtagttgggattataggtatgcgttattacgtttggttaattttgtatttttaataggggtggagtttttttacgttggttaggttggtttcgaatttttaattttaggtgattagttagtttcggttttttaaagtgttgggattataggcgtgagttatcgtgttcgattaattttttttttttttttttgagacggagttttattttgttatttaggttggagtgtagtggcgtgatttcggtttattgtaagttttgttttttgagtttacgttatttttttgttttagttttttatgtagttgggattataggcgtttgttattatgttcggttaatttttttgtatttttagtagagacggggttttattatgttagttaggatggttttaattttttgattttaggtgatttatttgttttggttttttttttgtgtatttttaaaagagacggggtttcgttatgttaggtaagttggttttgaatttttgattttaggtgatttgtttgtttcgggtttttaaagtgttgggatgggattataggcgtgagttatcgtgttcggttttttttttttttttttttttttttttagagatagattttttttttgttgttttggtgtaattatagtttattgtagtttcgattttttgggtttaagtaatttttttattttagtttttttagtagttaagattataggtatataatattatgttttgttaattttttttttttttttttttttttttggtataagtagggtattgttgttgtttaggttggtttggaatttttgtatttggttttaagcgatttttttgttttggttttttaaatggttgggatgggattttaggcgtgatatatcgtagttggttgttttttttgttgttgttgagataaggttttgttttgttgtttagggcggaatgtagtggtgtaaatatggtttattgtggtttcgattttttgtgtttaggtgatttttttgttttagttttttaggtagttgggattattaaatgtataggtgtgtattattatatttagttaatttttaatttttttttgtagagatatggttttattttgttgtttaggttggttttgaatttttgggtttaagtaatttttttattttagttttttaaagtgttgggattataggcgtgagttattgggtttagtttttattgagttttaattttcgtttatttgattattatttttaggattttaaatatttagagattattaaggtgtatggtgtataggtttaaattgtaggttgaattttaatttagtattagtattttttaatgcgattatagaattgattattattatttattttttttgagatggagttttgtattgttattagggttggagtgtaatggcgtaattttggtttattgtaatttttattttttaggtttaagggatttttttgttttagttttttaattagttgggattataggcgttcgttattatatttagttaattttttgtatttttagtagagacggggttttattatgttagttagaatggtttcgattttttgatttcgtgatttgtttgttttagttttttaaggtgttgggattataggcgtgagttatcgcgtttggtttagaattgatgattaatttagttgagtttttgtttatttgaatgggtattgttaatagtatttatttataagagttgttgagaagatttaatgagataaatagttgttaaagtgttaggtatgtagtagtgtttaagaaattttttattttgggttttttattggtattgattgatgtagaggtgggggagaagattaaagataaggattgagaattagggatgggaaaagtagtgggttattgatagtcgttttgtttgtttgggaggtggggtggggaaagtgggcgggatatgtttttgggtttggtttatttagattattttataggttgtcggtttgtgcgtttgtattcggtggttatagagtaattttttttagagggagttgattggagtcgggtgtcgttggtatttttatgattattggagtttcgcgggtttttcgggttgtatagggataagtaaaggttatatttagatgtcgggaatgtattgacgtttatttttggaaattgggtttttatttagtttttgggagtagtagtcgttagtttttcgggatttttatttttattttgttgagttattcgggttgggttaggatttcggtaggtaagttggaagggttttgtttatttttttagattttagtagttttagttttagggtggggtagggagtttgtcgggagtcgggtggggaaggggaagtttaaggtttttttgggtaggtttgtcgtttcggttggggatttgattttgttatgtttgtttttggttgttttttatagtttttttttttggtttagttttggatgtcggagaattgtaagaattgggttttttaatagtttgggagatgggagtggaggttagagttaaggttaagggtagagagagaatttttttagcgtttgttgttgtttaatatttttagattgggtttagggtttggttaggtatgtatttttgggtaatatttatcggggtttagtaagtttaggaagtcgggggtggttttttttatcgggaatttaggttatttggatgggggaggtagagttaggtttgagttagtataggttgttggttttggtgggtgttttgaggttttatttgtttttttcggaagtttggggtgttggtagagggagttggaggtgtagttagtattttttagttttattgttttgggggtgtcgggttttggagattggggaagaaggaaggttattttatgtaaggagttacggggggtgggaggtaagtaaaattttttttttttgttttttgaaatggagtttcgttttgttgtttaggttggagtgtagtggcgtaatttcggttgatcgtaattttcgtttttaaggtttaagcgatttttttgttttagtttttcgagtagttgggattataggcgtacgttattatgtttagttaatttttgtatttttagtagagatggggttttattatgttggttaagttggttttgaatttttgatttcgtgggttattatgttcggttgtaaagttttgttttaataaggttttgtttttagaggtggaggagaggaaggtttgtttttattttgtttttgttcggtagatcgaggaggagtggggagttgggtgagggtataggtggtttagtttttttttatttttttttgagagtttttggggtattttcgaaaatatttttaggtttagcggaaggagggtgggcgaaggtttttaggttttgggcggtgggggtggggttgtgtgtttggtttagggtggggttgtatattttttttttttgggataggaggagggcgttttttttttgagggttggaggttgtttggggaaatggggttttgggaggggtgtaaattgaaagtgaaatagttgatatttaggaaatattcgttttgatgaggggttatagtaggttggggttgcggttaggattaggtaaagaggaaaattggggtcggggatagaagattaggtgtgtggtgggagtacgaggtaggttatggggttttaaagaaggttttgattttgagggtttttttcggttattgtaaggtagtagtggggaaggtatagataggaggtaaatagggaaagttgttttgagaaagaatatattttgaggtttataaattggaaaagaaattttgtatgcgtgttgagtatatggatttacggagatttagataaataatttgatttttcgtgattaacgatgtgatttcgggtatttaattttttgtgttttattttttttgtttgtaaagtgggtatgatggcgtttattttgttgggtttatgtgagtttttagtgtttattatttatagagtgtttttaagtgggagagtatattttaggtttttaggaaatgtttgcggttaatagtttagagttaaaaaataggtgtgttttggttagttagagggaagtagggtttttgaggatagtttttatgggttattggttgggtagtggttcgtttgtaataagtatgtgttgggtgggttgtaggaggttttaggaatagttaaaaattttttaggtttttgttttaggagtggtatgaatttgagagttagcgggtattgttgtagttatatttttttcgatggtgtagatattttagtttgtttttggttgttttatttttttattttgttttttttaaagagggagtgtttagtaagttgtttttttttagtagattttattgggatttatgttggagtaagaataaaaagttttagaggaggttaggtacggtggtttatatttgtaattttagtattgtggatggtcgaggtagatttacgaggttaggagtttgagatcggtttggttaaagttttagaggattaagggtttttttgggaatgggggatttttttttttatgtggatatggtaatttgtatggggtttttagttataggtttgtgtttatttttatttttgttttttttcgttttttttcgtagg

SEQ ID NO: 16 - DNA, 7558 bp, Artificial Sequence
  chemically treated genomic DNA (Homo sapiens)
tttgcggggaagggcgagaaaaagtagagatgggggtgagtatagatttgtgattggggattttatataggttgttatgtttatataggagagaggattttttatttttagaaaggtttttagttttttgggattttggttaggtcggttttaaatttttgatttcgtgagtttgtttcggttatttatagtgttgggattataggtgtgagttatcgtgtttggttttttttgggattttttatttttattttagtatgggttttagtgaagtttgttgggaggaaataatttattgaatattttttttttgagggagatagggtaagaaggtgaggtagttaagggtagattgaggtatttgtattatcgaggagggtgtggttgtagtagtgttcgttggtttttaagtttatgttatttttggggtaagagtttggggggtttttagttgtttttggggttttttgtagtttatttagtatatgtttattgtaagcgagttattgtttagttaatggtttatgaaggttgtttttagaggttttatttttttttggttggttagaatatatttgttttttaattttgggttgttagtcgtaaatattttttgagagtttaagatatatttttttatttaggagtattttgtgggtggtgaatattggaaatttatatgaatttagtagggtgagcgttattatatttattttataggtaggaaaagtgaggtataaagagttgagtgttcgaggttatatcgttagttacggaaagttaggttgtttgtttgaattttcgtgagtttatgtatttaatacgtatgtaagattttttttttagtttgtggattttagagtgtgtttttttttagggtaattttttttatttattttttgtttgtgttttttttattgttgttttgtagtgatcggagggagtttttaggattagggttttttttgaagttttataatttgtttcgtatttttattatatatttggttttttgttttcggttttaatttttttttttgtttggttttgatcgtagttttaatttgttgtgattttttattagggcgagtgttttttggatgttagttgttttatttttagtttgtattttttttagagttttatttttttaggtagtttttagtttttagaaggagagcgttttttttttattttagagggagggggtgtgtagttttattttgggttaagtatatagttttatttttatcgtttagggtttggggattttcgtttatttttttttcgttaggtttgggagtgttttcgaaagtgttttaagagtttttaagaaggggtggaggagggttggattatttgtgtttttatttagttttttattttttttcgatttgtcggatagggatagggtgaaggtagattttttttttttttatttttaggggtaaggttttgttaaaatagaattttgtagtcgggtatagtggtttacgaggttagaagtttaagattagtttggttaatataatgaaattttatttttattaaaaatataaaaattagttgggtatggtggcgtgcgtttgtagttttagttattcgggaggttgaggtaggagaatcgtttgaattttggaggcggaggttgcggttagtcgagattgcgttattgtattttagtttgggtaatagagcgagattttattttaaaaaataaaaaaaaagagttttgtttgttttttatttttcgtagttttttatataagatggtttttttttttttttagtttttaggattcggtatttttaggatagtagggttggaggatgttgattgtatttttaattttttttattaatattttaggttttcgaggggagtaggtagagttttagaatatttattaaggttagtaatttatgttgatttaggtttagttttgttttttttatttaagtggtttaaattttcggtgaggggagttattttcgattttttgggtttgttgggtttcgatgaatgttgtttagggatatatgtttggttaggttttggatttagtttagggatgttgggtagtagtaagcgttgagaaagttttttttttgtttttgattttggttttgatttttatttttattttttagattgttaaaggatttagtttttatagtttttcggtatttagggttgggttaagaggggaagttgtgaggggtagttagaggtaggtatggtaggattaggtttttagtcggggcggtagatttgtttagggaagttttgagtttttttttttttattcggttttcggtaggttttttgttttattttggggttggggttgttgagatttgggaggatggataagatttttttagtttatttgtcgggattttggtttaattcgggtggtttagtagggtggagatggaggtttcgaggggttggcggttgttgtttttaggggttgagtgggagtttagtttttaggaatgggcgttagtgtattttcggtatttggatgtagtttttatttgtttttgtgtagttcgagggattcgcgagattttagtgattatagaggtgttagcggtattcggttttaattagttttttttagaggaagttgttttgtggttatcggatgtagacgtataggtcgatagtttgtagggtgatttgggtgggttaggtttaggagtatgtttcgtttattttttttattttattttttaggtaggtagggcggttgttagtggtttattgttttttttatttttgatttttaatttttgtttttgatttttttttttatttttatattaattaatattaataaaaaatttagggtgagaagttttttaagtattgttgtatgtttggtattttagtaattatttgttttattggatttttttagtaatttttgtaagtgagtgttgttgataatatttatttagatgaatagaggtttagttgggttaattattagttttgggttaggcgcggtggtttacgtttataattttagtattttgggaggttgaggtaggtagattacgaggttaagagatcgagattattttggttaatatggtgaaatttcgtttttattaaaaatataaaaaattagttgggtgtggtggcgggcgtttgtaattttagttagttggaaggttgaggtaggagaattttttgaatttgggaggtggaggttgtagtaaattaggattgcgttattgtattttagttttggtgatagtgtaagattttattttaaaaaaaataaatagtaataattagttttgtagtcgtattggggaatattaatattagattgagatttaatttgtaatttagatttgtgtattatgtattttggtggtttttggatgtttgaaattttgaaggtgatagttaagtaaacggagattaaaatttaatagaggttgggtttagtggtttacgtttgtaattttaatattttggaaggttgaggtgggaggattgtttgagtttaggagtttaagattagtttgggtaataaagtgagattatgtttttataaaaaaaaattagaaattagttgggtatggtagtgtatatttgtgtatttggtggttttagttatttaggaggttgaggtaggaggattatttgagtataggaagtcgaggttatagtgagttatgtttgtattattgtatttcgttttgggtaatagagtaagattttgttttaataataataaaaaaggtagttagttgcggtgtgttacgtttagaattttattttagttatttgggaggttaaggtaagaggatcgtttgaggttaggtgtaggagttttaggttagtttgggtaatagtaatattttgtttatattaaaaaaaaaaaaaaaaaaaaaaaaaattagtaaggtatggtgttgtatgtttgtggttttagttattggggaggttgaggtgggaggattgtttgagtttaggaggtcgaggttgtagtaagttatgattgtattagggtaatagagggagagtttgtttttagaaaaaaaaaaaaaaaaaaaaaaaaggtcgggtacggtggtttacgtttgtaattttattttagtattttgggagttcgaggtaggtagattatttgaggttaggagtttaagattagtttgtttaatatggcgaaatttcgttttttttaaaaatatataaaagggaggttaaggtaggtggattatttgaggttaggagattgagattattttggttaatatggtgaaatttcgtttttattaaaaatataaaaaaattagtcgggtatggtggtaggcgtttgtagttttagttatatgggaggttgaggtaggagaatggcgtgaatttaggaggtagagtttgtagtgagtcgagattacgttattgtattttagtttgggtgatagaatgagatttcgttttaaaaaaaaaaaaaaaaaattggtcgggtacggtggtttacgtttgtaattttagtattttgggaggtcgaggttggttgattatttgaggttggaagttcgagattagtttgattaacgtggagaaattttatttttattaaaaatataaaattagttaggcgtggtggcgtatgtttgtaattttagttattttggaggttgaggtaggagaattgtttgaattcgggaggtagagttgtggtaagttgcgattgcgttattgtattttagtttggttaataagagcgaaattttattttaaaaaataataataataataaataaataaaataaagtcggttgtggtggcgtgcgtttataattttagttatttgggaggttgaggtaggagaattgttgaatttaggaggcggaggttgtagtgagttgagattgtattattgtattttagtttgggtgataagagtgaaattttattttaaaaaaataaaataaaaatagggtcgggtacggtggtttatgtttgtaattttagtattttgggaagtcgaggtaggtggattataaggttaagaggtcgagattattttggttaatatggtgaaattttgtttttattaaaaatataaaaattagtcgggcgtgatggcgggtatttgtagttttagttatttaggaggttgaggtaggagaatcgtttgaagttaggaggcggaggttgtagtgagttaagattgtgttattgtatttttgtttggcgatagagttagattttattttaagaaattaaaaataaaaataaaaataaggtcgggttcggtggttttcgtttgtaattttagtattttgggaggtcgaggcgggtggattacgaggttaggagatcgagattattttggttaatacggtgaaattttatttttattaaaaatataaaaaattagttgggcgtcgtagtaagcgtttatagttttagttgtttgggaggttgaggtaggagaatggcgtgaatttaggaggtagagtttgtagtgagtcgagatagtttattgtattttagtttgggcgatagagcgagattttgttttaaaaaaataaataaataaaaataaaaataaataaataaatagatttagtggggtttgtgttattatttggatataaaatttggatgttaagagggaagatagatattgtttggttgttgggagtgtttttgaggatagaataaatttaggaaggatagaggtgtgtgtagtttttaatagtttttgtttttagggtttagttttttttttgtttttttttgtttgttttttgttaagttttttggggtttttatatttttttttttaagtttttatttttttttttttaaaatttttgtttgttttttatatttttttttttgttttattaaatttttgttttttttatttttaattaattttttttaattttttattttttttagtttttgttttttagaattttgggaagtttttaattggaggttttaatttgaaaattttttttgtttttaagtagttggttttggggtggttgttataggatttgaattggggatttttttaggatggaggttttagtttcgaagttttgattatgaattttaggttgtttttttatgtttcgttattagggtgttatttttttgatgatgagttaagagggatatgtgaggaggagggggtcgggattatttgttttgtcgttttattttttttttgtggttatatttaggggttttttaaaacggttatagtagttttttttaaagttgggtatggggcgtatggtgatttatatttgtaagagtaagaaggtttggcggagaggtgaagttagttttgtttatagtaagttaggaggtgttgggtaatttgtttgagaaggaggggaaggagttagtaggggacgtttttgggaaaataggggttttagataggtgaggggttggaattggggggtatttaggttggtaaggtttgggatagaggtattgagaagaggtttggatatgagatgggggaagggtatgggtttgagatgggggatttatgttggggagggtttggggagggaggttttgggtgggtaaaggtttggaatagggtatttggtggggaaggatagggagatgtgggtggggttaacggatagaagtatttggtggggaggaggttggagatggggatttggtttgggaaggagggagagatggggtttttttataagtgaggggttgtggatgggggatattagatatgaaagaggataggttagggagtagaaagggaatatgttagggttagagggacggggggttttgttgtttttagttttttttataggtttggtagttattttttgtgaggatagggatttatttttttttgttttttatttttttattattttatttttgagagcgataatttttttttatgatgaggattttagatgtagagtagggggttgatgggagaggaaggttgtagagggttagtagatttgtaggtgagttttgggggaggtttagggggtttttgttatatttttgagttttatttgttttttttatttgattgtgttttgggattagtagttattttatttagattttgtagttgaaggaagaatatttgtagagagttatagggtttcgtgaggttagttttgagttttttattagggagaaggagtgtttgtttgaaggtgagtgtggtggttataggtataggggaagcgttagaaacggattttttttttgtagaattttttaggggtgtggggtttggtaggatacgggatatattttgagggattgttggagttagattgtttgggtttaaatgttagttttaatatgttgagtcgtgcgatgggtggtagtttgtttaatttttttgcgtttgttttttcgtttttaaagtgggaatataatagtagttatttttgaaggaagttgtaaggatgaattgagatattttttgtaaaatgtttagaacggtgtgtggtatatagtaggtatttgttaaagaaaataagataattttatttataattt

SEQ ID NO: 17 - DNA, 5518 bp, Artificial Sequence
  chemically treated genomic DNA (Homo sapiens)
gtataaattatatttttaagagtggggagaatattgtaaagtatttttttaagtggggtggaggggagaatatattatattagttagagtggggtaggaataaattattatggtggaatgttattagttaaggttatttttattttttttgtggatttttagttgttttcggttatttggatgtgtacgtgtaggttataggggatatgacggtttagtttgggtttagaggtttgatatttattatatggtagttggttttttttaaaggaagtgatttgaaagggaataaggtggaagttgtagtggtttttttgatttgttttgtgaaattatattttgttatttttataatatttttttggttatattgtttagttttattgagtgtgggtagagattatatagtagtatgaatatttggaggtgtgattttttaggtgttattttggatgtgggtttaatagttttgatttagtatttttattattataaagagtttggttgggtgcggtggtttacgtttgtaattttagtattttgggaggttaaggcgggcggattatgagggtaagagatcgagattattttggttaatatggtaaaagtttatttttaataaaaatattaaaattagtagggcgttgttatacgtttatagttttagttatttaggaggttgaggtaggagaattatttgaattcggaggcggaggttgtagtgaattgagattatattattgtattttagtttggcgatagagtaagatttcgttttaaaaaataaaataaagtaaaataaaataaaatatataaaaaagagttttagttaggtatagtgacgtatgtttgtagttttagtattgtgggaaattgaggtaggtggtttatttgagtttaggggtttgagattagtttgggtaatatggtaaaattttttttttataaaatatataaaattagtagtgtatagtggtatatacgtgtagttttagttattttagaagttgaggtgggaggattttttgagtttaggaggtcgaggtggtagtgagttatagttgtgttattgtattttagtttggacgatagagggagattttgttttaaaataaataaataaaaataaaaataaatagttttgattttataattagttaaaaagtgtatttttttatttagtgattgtattgtttagaggtgtatatttgtattaaaagttttttttttttttttttgtaattggagtagggaagggttattttttgttatgattggaagttttttgaggtttttttagaagtagaagtttgtgttatatttgttgtatatagtttgtagaattatgagttaattaaattttattttttttttttttgagatgaagtttcgttttgttattcgaggtggagtgtaatggtacgatttttgtttattgtagtttttgttttttgggtttaagtgattttttggttttagttttttaagtagttgggattataggagtatattagtacgtttagttaatttttgtatttttagtagagatagggttttattatgttggttaggttggttttaaatttttgattttaggtgatttgtttgttttggttttttaaagtggtgggattttaggtgtgagttattacgttggttaaggatatggttttttatagagattttgttttttaaatttataaattgttggaaattttattagtaaaaatgaaatattcgagttttgttgataggatttaatttatttgatatagagtagtagttttgatttttaaagtaggtgtatagttttagataaagggtttttggatgtaatattttatatgtatttttttgtttttagcgatttaggatattggttttattttatagttttgatttaatgttgattttgttttgttttaagttattatttggttgttatttaagttttattttttttttttattttggttttttttttttttttttttttttgagataggttttttttttgttatttagtttgattgtagtgatgtaattgattatagtttacggtagtcgggattttttaagtttaaataatttttttattttagttttttaagtagttgggattataggtacgtattattatatttagttaatttttttttttttttgtttttttttttttttgtttttttttagatagaggtttgttttgttgtttaggttggggtgtagtggtacgattttggtttattgtaatttttgttttttgggtttaagcgatttttttgttttagttttttaagtagttgggattgtaggtacgcgttattatttttagttaatttttttgtatttttagtggagacggggtttcgttatgttggttaggttggttataaatttttgattttagatgatatatttatttcggttttttatatagttggtattataggtgtgagttattacgttcggttttttttttttttttttgttttttagttgatatagggttttattatggtatagtttaggttggttttgaatttttggttttaggtgatttttttgttttggttttttaaagtgttgggattataggaatgagttattatatttggtttttttttttaatttttaaaataaattgattttttaaggttaagaggaaatattttttttgagaagttttttttgaatgttagaggtagataatgtttgatttttgtatgttttttaatatttaattatatagttattgaataatatattttgagagataattatgaattaagtaatatgttggtttttgggagaattgaggataaattaattttgtggaaattttgggtggatgaaaaaaattaatatgaaattaaaatattgtatatatttatagttgtgagaagtattatatattttgggtgttatgcgagttttttttttttttttttttttttttgagttggagttttttttttgttattgaggttggagtgtaaggttacgattttagtttattgtaatttttgtttttagatttaaacgatttttttgttttagttttcgagtagttgggattataggtgtttgttattatatttggttaatttagaatttttagtagggatagggttttatcgtgttggttaggttggttttaaatttttgattttaggtgatttatttatttcggttttttaaagtgttgggattatagaagtgagttattgagtttaattaggagttttttcgagaaagaaggaagtttaagagatttttttgatattttagtttgattttgttttttgtttgtttaaaatttttttatgttttttagcggttttttggatatagattaagttttttttttgataggtttaaattttttattatttgattttagtttatttttttgagttttttttagttgttattattttttgtttaaagtgatatgttataatatttataaagtatataagttttatgtgtatagtttaatgaattgtaaatatgtgtatattcggtcgggtatagtggtttacgtttgtaattttagtattttgggaggtcgaggtaggtggattatttgaggttaggagtttgagattagtttgattaatatagtgaaattttatttttattaaaaatataaaattagttgggcgtggtgtcgtatgtttgtaattttagttatttgggaggttgaggtaggagaattgtttgaattcggaggtagaggttgtagtaagtcgagatcgtgttattgtattttattttgggtaataagagtaaaatttcgttttaaaataataataataataataataataataataataataatgtgtatatttatgtaaatattatttagataaaaatatggtatatttggggtattcggggagtgttttttgtggttttttttttttatattttgttgatttattagtatagattagtttttgttattttttaaattttatattttttttttttttatataaatataaatattcgagttatgattgggtggggtggtttaagtttgtaattttagtattttgggaggttaaggtgcgaggatcgtttgagtttgggagtttagagattagtttgggtaatatagagagattttatttttatataaaaagttttaaaaattaattaggggcggtgtagttttagttatttaggaggttgaggtgggaggttttagttcgggaattttagattgtagtgagttatgattgggttattgtattttagtttgggtaatatagtgagattttgttttaaaaaaaaaaaaaaaaaaaataggaaaaaataaataaatagaaaagtaggtttggcgcggtagtttatgtttgtaattttagcgttttggaaggttgagacggggttattttttgggtttataagttagagataagtttgggcgtgggttatattgttagatttaggtttttgtaaaaaataaaattatttagtttttagttatttataacgttttgtttggaagtatgttattttgggtttttgagtttttgtatttgttaattttttttgcgttggggagagtttaaattttgttcgaaatttttaaaaatggtgtttggataaatgaaggtattagagttgcgattggacggacggttgttggacggcgttattgttggtatttatcgggagatgtttattggatagttacgtgacgggattaaatttttcgagggagcgaggtaggtgcggttacgtgattcggcggcgttgcggggtagcggttattttgcggggcggttacgtgaaggacgtacgtttagcggggtttttacgtgattcgggcgcgttgcggtcgttcgcgcggattcggcgagaggcggcggcgggagcggcggtgatggacgggttcggggagtagtttagaggcgggggtgaggcgggaggtagacgggcgggaggagggcgagttttttcgtcggttcgttcgggattttttttatcggtttggggttgtgcgatttttaagtattgaggggtagaaattttcggatcgggcgttgttagtttttagtttttttcgttttcggaggtttttggttttttgattttcgtgtttcgatttttgtttttttggcgttttcggattttcgagaattaggggatttcggaagttaagttttcgggtaggttcgggtttgtcgttcgtattattttttgtttttggtattggtgggaggggcgggtttcgtttttgtttttttaggttaggggtttggatgtatatagcgtttttttagttttttttttcggggagaatgtaggatataggtttagttttttggtttttttttattagggatttagttgtttgggttttttcgttattttatttgttagggttttagaagtttagggttttagttttgtttttttttagggtcgtgagtttttatagttttttgattttttagaatttaagagtttaggtatttttttttttttttttttttttagg

SEQ ID NO: 18 - DNA, 5518 bp, Artificial Sequence
  chemically treated genomic DNA (Homo sapiens)
tttagaggagaaaggaagggaagaggtatttggatttttgggttttaggggattaggagattgtggagatttacggttttgagggaggatagagttgggattttggatttttgggattttagtagataaagtgacgggggggtttagataattgagtttttgatggagaaaggttaggaggttgggtttgtattttatatttttttcggggaaagaggttaggggaacgttatatgtatttagatttttggtttgagggggtagaggcgagattcgttttttttattagtgttagaggtaggaagtggtgcgggcgataagttcgggtttgttcgggggtttggttttcgagattttttggttttcgagggttcgagagcgttagagaggtagggatcgggatacggggattagagagttaggaattttcgaggacggaggggattggaggttggtagcgttcgattcgggagtttttgttttttagtgtttggagatcgtatagttttaggtcggtaggaaggatttcggacgggtcggcgagggggttcgtttttttttcgttcgtttgtttttcgttttattttcgtttttgggttgtttttcggattcgtttattatcgtcgttttcgtcgtcgtttttcgtcgggttcgcgcgggcggtcgtagcgcgttcgggttacgtgagagtttcgttgaacgtgcgttttttacgtggtcgtttcgtaaaatggtcgttgtttcgtagcgtcgtcgggttacgtgatcgtatttgtttcgttttttcgggaggtttggtttcgttacgtgattgtttaatgagtatttttcgataagtgttagtagtggcgtcgtttaatagtcgttcgtttaatcgtagttttaatgtttttatttatttaggtattatttttagaagtttcgggtagggtttgagttttttttagcgtagaaggaattagtaagtgtaaaagtttagaggtttaaaatagtatgtttttaggtaggacgttatagatgattaaaaattgagtggttttgttttttgtagagatttggatttagtaatatagtttacgtttaggtttgtttttaatttgtgagtttaagagataatttcgttttagttttttaaagcgttgggattataggtatgagttatcgcgttaggtttgtttttttgtttgtttgtttttttttgttttttttttttttttttttgagatagggttttattgtgttgtttaggttggagtgtagtggtttaattatggtttattgtagtttggaattttcgggttgaagttttttattttagttttttgagtagttgggattatatcgtttttggttaatttttaaaattttttatgtggagatgaggtttttttatgttgtttaggttggtttttgaatttttagatttaagcgattttcgtattttggttttttaaagtgttgagattataggtttgagttattttatttagttatgattcgaatgtttgtgtttgtgtaaaaagaaaaggaatatgaagtttaaaaagtggtagaaattaatttgtgttgatagattagtagggtatggaggggaggggttataagagatatttttcgggtgttttaaatatgttatatttttatttgaatggtgtttatatgggtatatatattattattattattattattattattattattattattttgagacggagttttgtttttgttgtttaggatggagtgtaatggtacgatttcggtttattgtaatttttgttttcgggtttaagtaatttttttgttttagttttttaagtagttggaattgtaggtatgcgatattacgtttagttaattttgtatttttagtaaagatggggttttattatgttggttaggttggttttaagtttttgattttaagtgatttatttgtttcggttttttaaagtgttgggattataggcgtgagttattgtgttcggtcgggtatatatatatttataatttattgagttgtatatataagatttgtgtgttttatgaatattatgatatgttattttagatagaaaataatagtaattaaggaaaatttagaaaaatgagttaggattagatgataaagggtttgggtttgttagagaagggatttgatttatgtttagaaggtcgttgggaagtatggggaaattttgagtaggtaaagggtagagttagattagggtgttaggaagattttttggatttttttttttttcgaaaaagtttttggttgggtttagtggtttatttttgtaattttagtattttgggaggtcgagatgggtagattatttgaggttaggagtttgagattagtttggttaatacggtgaaattttatttttattaaaaattttaaattagttaggtgtggtggtaggtatttgtagttttagttattcgggagttgaggtaggggaatcgtttgaatttggaggtagaggttgtagtgagttgagatcgtgattttgtattttagttttagtaataagagggaaattttaatttaaaaaaaaaaaaaaaaaaaaaaaaagttcgtatagtatttaggatgtgtaatgttttttatagttgtaaatgtgtgtagtgttttaattttatgttggttttttttatttatttaaaatttttataaggttaatttgtttttaatttttttagaaattagtatgttatttgatttatagttattttttaaaatgtgttatttaataattgtatgattgaatgttggggagtatgtagaaattagatattgtttgtttttgatatttagagaagattttttagaggaggtatttttttttgattttgaaggattagtttgttttgaaaattgaagaaaggggttaggtgtgatggtttatttttatagttttagtattttgggaggttaaggtaggaggattatttgaagttaggagtttaggattagtttgggttgtattatggtgagattttgtgttaattaaaaaataaaagaaaggagggggggtcgggcgtggtagtttatatttgtaatattagttgtgtgggaggtcgaagtgggtgtattatttgaggttaggagtttgtgattagtttagttaatatggcgaaatttcgtttttattaaaaatataaaaaaattagttgggagtggtggcgcgtgtttgtagttttagttgtttgggaggttgaggtaggagaatcgtttgaatttaagaggtagaggttgtagtgagttaagatcgtgttattgtattttagtttgggtaatagagtaagtttttatttaaaaaaaaataaaaagaaaaggaagtagaaaaaaaagaaaattagttggatgtggtggtgcgtgtttgtagttttagttatttgggaggttgaggtgggaagattgtttgagtttgggaggtttcggttgtcgtgagttgtgattaattgtattattgtaattagattgggtgatagaggaagagtttgttttaaaaagaaaaaagaaaagaaaaagttaagataaagggggagggtagagtttaggtgataattaaatgatagtttagagtaaagtaaggttaatattggattaggattgtgaagtgaaattagtgttttgaatcgttggaaataagaaggtatatgtgaaatgttgtatttagaaattttttatttgaagttgtgtatttgttttggaaattaaggttgttattttgtattaagtggattagattttgttagtaagattcggatgttttatttttattgatagaatttttaataatttatgaatttagagaataaagtttttgtaagaaattatgtttttggttagcgtggtggtttatatttgaaattttattattttgggaggttaagataggtagattatttgaggttaggagtttgagattagtttggttaatatggtgaaattttgtttttattaaaaatataaaaattagttgggcgtattggtgtgtttttgtaattttagttatttgggaggttgaggttagagaattatttgaatttaggaggtagaggttgtagtgagtagagatcgtgttattgtattttatttcgggtgatagagcgagattttattttaaaaaaaaaaaaaatgaggtttaattggtttatggttttgtagattgtgtatagtaagtgtaatataggtttttgtttttggggaggttttaggaagtttttagttatggtagaaggtggtttttttttattttagttatagagaaggaaggaaagggtttttaatgtaggtatatatttttgaatagtatagttattgagtgagggaatatattttttagttagttgtgaagttaaaattgtttatttttatttttatttatttattttgagataggatttttttttgtcgtttaggttggagtgtaatgatataattgtggtttattgttatttcgattttttgggtttaagggatttttttattttagtttttggagtagttgggattatacgtgtgtgttattatgtattgttaattttgtatgttttgtagggagagggttttgttatgttgtttaggttggttttaaatttttgggtttaagtgagttatttgttttagttttttatagtgttgggattataggtatgcgttattgtgtttgattaaaatttttttttgtgtgttttgttttgttttgttttgttttgttttttgagacggagttttgttttgtcgttaggttggagtgtagtggtgtgattttagtttattgtaattttcgttttcgggtttaagtgatttttttgttttagttttttgagtagttgggattataggcgtgtgataacgttttgttaattttgatatttttattagagataggtttttgttatgttggttaggatggtttcgattttttgtttttatgattcgttcgttttggttttttaaagtgttgggattataggcgtgagttatcgtatttagttaaattttttataataataaagatgttgaattaaaattattaagtttatatttaagatggtatttgaggagttatatttttaggtatttatgttgttgtgtggtttttgtttatatttaatagggttaaatagtgtgattaagaggatattgtggaaatgatagagtgtgattttataggataggttagaaaagttattatagtttttattttgtttttttttagattattttttttaaggaaagttagttgttatgtggtgagtgttaggtttttgagtttaagttaagtcgttatattttttgtgatttgtacgtatatatttagatggtcggaagtaattgaagatttataaaagaagtgaaaatagttttaattgatgatattttattatggtgatttgtttttgttttattttaattgatatgatatatttttttttttattttatttaagaaggtattttgtaatattttttttatttttgagaatgtaatttgtat

SEQ ID NO: 19 - DNA, 5989 bp, Artificial Sequence
  chemically treated genomic DNA (Homo sapiens)
tgtttatattttgtttatttaattatgaagggaagagggttatattgtataggtgtggtagttgatatagggtttagaaaaaggggtatgtagttggggattattttaaaaatatttattatttttattttagttaatagatggtgtgtttagattttaatatttgagaagtagtttattattattgttttttaaatgtttagatgttttttatttgttttttttgttattagtttataattatttggtagtggaagtataaaatataagaggttgttttttgaaatatttgttgggttattaagggtattaaatatttgtttttagtgttagggaagttaaaatagaggtcgtgggttaatgatagagtaatgttttaatgtttatattggtttaaggaagttaaatgttgtagaaattttgtgggtagttttttattttttttttttatcgatgttagggtttgagaaaatttttggaatgtatttatttaagtttaattattttaataaataagatagagtatattttgaatgtaatttaaatatatttttttgtgggtaattatgagttagtttaagtagttttatgttttttgcgatgattatttttgatttattttattggttttttgattttatagtttaggtgtatgtgttataaggtgatattaggtgagattatattttgttttttttaatatttggtaatttttaatcgaatttatgtttaagaaattgtttttttgggaggttaaggcgggtagattatgaggttaggagatagagattattttggttaatatggtgaaattttatttttattaaaaatataaaaaattagttaggtttagtggtaggtatttgtagttttagttattggggaggttgaggtaggaaaatggcgtgaattcgggaggcggagtttgtagtgagtcgagatcgtgttattgtattttagtttgggtgatagagtttgatttcgttttaaaaaaaaaaagaaattgtttttttgttgagggaattttgttgatggattggaagagagatgggaggaagatgggtataaaataatgtggttttaaagagagatgtggttttgtatattaaagtaagaaattggtttagttatggatagagatatatttttaaagatgatgttttttttggagatatatttttatttgaagaatatgagaatatgtgatttaatgtgtttattattgttttgatttattgagaggtttggggttagttttgtttggttttattttgttcgggtattattttatgaagattttttaggagattaagtttttaattttggggtttttaagtgttttggatcgttggaagtagggattttttacgtggtgtgtgaggggtagagggttgaataaagttttagggaataggtggttgtttttgggttttgttagttattattgtgattgtaggttatgagtaatgtttattataggtaaatgagatatttaatttaggtttttaggattagtgggggtttttaggagtatagagtttatgggttatagtttatagaggataattatttttttttttgtttttggggtttttagtatttttttattttttagtttgtggattttttagtttggagagtaaagttttttttgtaattttgtagttatgtagtaggttgtttttgttttatatttgtattggtgatttttgaatttaaatattataaatttggttaattttttgttttaagagcgatattttttttttaaagtaatgataatttatatcgagttttttgggttgggaggaagattattagagtgtaagtgaagaaaattagagagtataaagttggaagaggtgtgtaggttgcgggtgggtaagaatatagagtgaattatttaaaatattaatttattttatatataggattaggtattgcgtttgtatataagttttgttattgtggagttgtgtgttttcgtttatatgattttttgttgggttataggatagatatgtggattttatatggaggagaaagtaggaaaagtagttggatttggtttggtttagtagagtttgggttgaattgtggacgttttgttgtagagttgagtggggaatttggattttgggatatgtattagggtgggataattttgaggatgttttatattagttttgtttattaggaatatgttgagagttatatatgtaattttatattttttagtagttatagttttaaaaagtaaaatgaaataggtgaaattaattttaatattaatatatttgttgaattttgtttatttaaaatattatattaatgtggtaattaatataaaaaataattaataagatgttttatattatatatataatttttaatagtatatatatatatatatatatatagagatatatattataaaatgtataattttttagagagtatatgtgatatatgagaatatatagatatataatattagagagagagagtttacgagttgtgtgtatatatatagttataatattcgtgttattgtgtgtgtgaaaattgtggcgattcgttatgtgagatagtgtgtgtaacgtttagtattttttagtggggggagggggggggagagaaatataaaaaatttttttcgtgtaaaggtaatgataatttgaaaggaaaaaggatgaaaatatgtaaattttatgataattttttaataataatgaatatttgggaaggatttaaggtgttagtggggagtgtttattattgtttttattttggttaagttattttaagttgtgtttggatggttgtgtgtaaggaatatggttgtgttttggttaaggataggacgaggtaaatatttatagggatttagcgagtttagagcgtaggtatataattttatttgttattatagttatgtagttataatatgggaaggttattttttggttttaagtattattgtttgtaaaaggtataattgttttgttgatatcgtgtaggcgtgttgatatttagagagagagagagagagttagagttgatttttttggagattgatagtggggagttaggatatagttcggtttgtttatgtttagagagaggaagagttaagttgttgatttcgaaggtaagggagagtcggttatgtagttgtgtgggggagtcgttagattaagtatttgagatagggtagatagtgtagagagttagtgtaagaaagttgttgatgagagttgttgttgagtaaaattattttttatttgtttacggttttttgagtgttttttttgtttatttatttattttttttggattttagtatgggttagaatttgattttaagtatgatatttggtttagtcgtgaatttgatattgtggtagtttttacgtagtttttgttttttgtttttgtttttgttatttattttttatttagtagttagagtgatttttttaaaatgaaattaaattgtttttttgttttattttaaaatgtttttattatttttattgttttattttggtttgaattataattttttggggtttggatatagtaatatttttttaaatggtttttttttttttattttttttttttttagtatagaagtgaaagtgtttttttttaaattataaattagattatgttattttgtttagaattttttagtggtttttcgtttgatttagtatatttatatgatttaatatataaggagattatttttttttagttatattgagtatttttattggttgttgattgtatttataatgttttttttttatatttatacggtttatttttttattttttttaagtataaattaaattttttattttggtattgataagataaggatagatttttttaaagtgagtagggaggttatgattattttagtttaaattttattaatttatatagttttattttatttttttgttttattttttttttttagtatttattattttttaataaattaaataatttagatatagttaggcgtgggggattatgtttgtaattttagtattttgggaggttgaggtgggtagattatttgaggttaggagttcgaaattaatttggttaatgtggtgaaattttgtttttattaaaagtataaaaattagttgggcgtggtggtgtgtgtttgtagttttagttatttaggaggttgaagtaggagaatcgttcgaattcgggaggtagaagttgtagtaagttgagatggtgttattgtattttagtttgggaaatagagtgagatttcgttttaaaaaaataaattaattaattatttttttaaaataatttagatatagtcgggtgtggtggtatgcgtttgtaattttagttattggggaggttgaggtaggagaattatttgaatttgggaggaggaggttgtagtgagtagagattcgtgttattgtattttagtttgcgtgatagagcgagattttgtttttaaataaataaataaataaatttagataaaattttttaagtgtttatttcgtttgttttaaatataaataaattagaatataaattttatgaggaaagagatttttattggttttgtttatagttgtttttttagtatttagaatagtgtttggtatatagtggatatttaaaatatatttgttaaatgaaaggatttattttaaagttaaggatggtttagtaaatcggatggaagatgatgaaaaattaagtaattagaaaaaaattgtttttgtgtaatgtgttaatatggaaataggatataatgtaaatattagaattttttgttgtgattttggtttttgtggttttggttatattgtttttttgtgtgtgtttttttttttttttgttttttcgttttttaaatattggcgtttttaagtttttttttggtttttttgttatttttatttattttcgtagttttaaatattatttagtttatagtttatttagtatgttgtttaagttatcgttttgggtttagggttttatttgtagttttttatttatattttttaggttgttttttatatagcgttatagtagttaaaatacggtttggggatagtcgtttttttattagtttttttttataaaatggaggatttatagtataagttgtttagaatatattagtaaggatttaataaatgtttgagtaggatgagttgggtggtttatgtttgtagtttttgtattttgggaagtcgaggcgggtggatggtttgagtttaggagtttgagattagtttgggtaatatggcgaaattttatttttataaaaaatataaaaaaattagttggatttttagttgtttggtggttgaggtggaaggatcgtttgagttttggaggtggaagttgtagtgagtcgagaatcgtattattgtattttagtttgggcgatagagtgagattttgttttaataaataaataaataattagttgagtgtatattgtgtgtttaattatttttaagaattttatatatgatttcggtagttttaaaaggtaagtatatttatttttattatatagattaattaatgaggaaaagttatgtttataatgaatagtgattaaaaagtatgtaaacgttaaatgaggtgttaaagtggtgggattgtaggtggttttttttttttttttaaaaatttgtttagtattgtagttaggttgtttgtgtgtatgtatgtgtatgtgtgtatgagtgcgtttgtgtgtgattaaaatagtaattggtaaacgtaataataggaaattgtagggtagggtttgggaaaaggggaggaatttaaggtattgataagtttagatcggattttttcgaagtgagtaggtagtaaaggttgagagtgttagttgtttgggtattgacggattttatttacggaaacgatgttttatgaggaagttaattcgggttatttatt

SEQ ID NO: 20 - DNA, 5989 bp, Artificial Sequence
  chemically treated genomic DNA (Homo sapiens)
ggtaagtggttcgggttagtttttttataaggtatcgttttcgtgggtggggttcgttagtgtttaggtagttggtatttttagtttttgttgtttgtttatttcgggggagttcggtttgggtttgttagtattttgggttttttttttttttttagattttgttttataattttttgttgttacgtttgttagttattgttttggttatatataaacgtatttatatatatatatatatgtatatatataaatagtttaattataatattaaataaatttttgaaagaaaaaaagaaattatttataattttattattttaatattttatttaacgtttgtatattttttggttattgtttattataaatatagtttttttttattagttaatttgtgtaatggagatagatatgtttattttttagggttgtcgggattatatgtaaagtttttaaaggtagttgggtatatagtatgtatttaattgattatttatttatttattgagataggattttattttgtcgtttaggttggagtgtagtggtgcgattttcggtttattgtagtttttatttttagggtttaggcgatttttttattttagttattaagtagttgggagtttagttagtttttttgtattttttatagagatggagtttcgttatgttgtttaggttggttttaaatttttgggtttaagttatttattcgtttcggttttttaaagtgtagggattataggtatgagttatttagtttattttatttaaatatttattgagtttttattaatatgttttaggtaatttatattatgagttttttattttatagggggagattgatgaagagacgattatttttagatcgtattttaattattatggcgttgtgtaagaagtaatttgagaagtgtggatgaaaagttataggtagagttttgggtttaagacggtggtttggataatatgttaaataaattataaattagatggtatttgaagttacgagagtagataaaaatgataggaggattaaggagaaatttgggaacgttaatgtttaagaaacgggaaagtaaaaaaaaaaaaaaatatatataaaaaaataatgtaattagagttataaaaattagaattatagtaagggattttgatgtttatattatgttttgtttttatgttgatatattatataaggatagtttttttttaattgtttaattttttattattttttattcgatttattgaattatttttaattttaggatgaatttttttatttaataaatgtgttttgaatgtttattatgtgttagatattgttttaggtgttaggaaaatagttgtgaataaaattaataaaaatttttttttttatggaatttatattttagtttatttgtgtttggggtagacgaggtaggtatttgaaaaattttatttaagtttatttatttatttatttggagatagaatttcgttttgttacgtaggttggagtgtagtggtacgagtttttgtttattgtaattttttttttttaggtttaagtgatttttttgttttagtttttttagtagttgggattataggcgtatgttattatattcggttatatttaagttattttaaaaaaataattaattaatttatttttttgagacggagttttattttgttttttaggttggagtgtaatggtattattttagtttattgtaatttttgtttttcgggttcgagcgatttttttgttttagttttttgagtagttgggattataggtatatattattacgtttagttaatttttgtatttttagtagagataaggttttattatattggttaggttggtttcgaatttttgattttaggtgatttgtttattttaattttttaaagtgttgggattataggtatgattttttacgtttggttatatttaagttatttaatttattagaagatgataaatattaagaggaaaaaataaaatagggaagtaggatgaggttgtatggattggtaaaatttaagttagggtggttatgatttttttgtttattttggaggagtttgtttttgttttgttaatattaagataagggatttgatttatgtttaaaggaagtgagggagtgaatcgtgtggatataaggagagagtattatgagtatagttagtaattaataaaaatgtttagtgtaattggaaggagatgatttttttgtgtgttgagttatatgggtgtgttgagttagacgggaagttattggaaggttttgagtagagtgatatgatttgatttgtgatttgaaaagaagtatttttatttttgtgttaaggggaaagaagatggaagagggaaaattatttagggaggtattgttatatttaggttttaggaggttgtggtttagattagggtggagtagtgagggtggtgggagtattttgaaatgaagtaaggaagtagtttgattttattttgaaaggattattttggttgttaagtggagagtagatggtaggggtaagggtaagaagtagagattacgtggaggttattataatgttaggtttacgattgagttaaatgttatgtttggggttaggttttagtttatgttgaggtttaaggggagtgggtggatgagtagaaagaatatttaggggatcgtaggtaggtaaaagatgattttatttagtagtagtttttattaatagtttttttatattagttttttatattgtttgttttgttttaggtgtttagtttggcggtttttttatatagttgtatggtcgatttttttttgttttcggggttagtagtttaattttttttttttttgggtatgagtaagtcgagttgtgttttggttttttattgttagtttttaagagggttaattttggttttttttttttttttttgggtgttagtacgtttgtacgatgttaatagggtaattatattttttatagataatagtgtttagagttaagggatggtttttttatgttatggttatatagttgtgataataagtggagttatatgtttgcgttttaaattcgttgagtttttgtggatgtttatttcgttttatttttgattaaagtatagttatgttttttatatatagttatttaggtatagtttaggatggtttgattagggtgggggtagtggtgagtattttttattgatattttaaattttttttaagtgtttattgttattaaaaaattgttatagaatttatatatttttattttttttttttttaaattattattgtttttgtacggggagaattttttgtgtttttttttttttttttttttttattaggggatgttgagcgttatatatattattttatatggcgagtcgttatagtttttatatatataatgatacgggtgttatagttatatatatatatatagttcgtgagttttttttttttagtattgtgtgtttgtgtgtttttatatattatatatgttttttgagaggttatatattttataatatatatttttatgtatatatatatatatatatattgttagaaattatatatataatgtaaaatattttattgattattttttatattgattattatattgatataatattttaggtagataaggtttaataaatgtattaatattaaaattaattttatttgttttattttgttttttaaaattgtggttattagaaaatgtgaaattatatatgtgatttttagtatatttttagtggatagagttggtatagaatatttttagaattgttttattttggtatatattttaagatttaggttttttatttaattttgtagtaggacgtttatagtttagtttagattttgttgaattaagttaagtttagttattttttttgtttttttttttatgtgaggtttatatgtttgttttgtagtttagtaaggaattatgtgaacgagaatatataattttataataataaggtttatatataggcgtaatatttgattttatatatgaagtgggttaatgttttaaataatttattttgtgtttttatttattcgtagtttgtatattttttttagttttgtgttttttgattttttttatttgtattttaatgattttttttttagtttagaaaattcgatatgagttattattgttttaggggaaggatgtcgtttttgaagtagagaattagttaaatttatagtgtttaagtttaaaagttattagtgtaggtataagatagaaatagtttgttgtataattgtaaaattgtaaagaaagttttgttttttagattaaggagtttatagattgggggatagggagatgttaaggattttaagggtagaaggagagatagttgttttttatggattgtagtttataagttttatatttttggagatttttattggttttgaggatttagattagatgttttatttgtttgtggtgaatattgtttatggtttgtagttatagtgatgattagtaaggtttaaagataattatttgttttttagggttttgtttagttttttgttttttatatattacgtgaaaagtttttgtttttaacggtttagggtatttagaagttttaggattgaagatttggttttttagagggtttttatggaatagtattcgggtaagatgggattagatagaattggttttaaattttttaataagttaaggtagtggtggatatattgggttatatatttttatattttttaggtaggaatatgtttttaaaggagatattatttttggaaatgtgtttttgtttatagttaaattaattttttattttaatgtgtagagttatatttttttttgaagttatattattttatgtttattttttttttattttttttttagtttattaataggatttttttaatagaggaatagtttttttttttttttgagacggagttaagttttgttatttaggttggagtgtagtggtacgatttcggtttattgtaagtttcgtttttcgggtttacgttatttttttgttttagtttttttagtagttgggattataggtgtttgttattaagtttggttaattttttgtatttttagtagagatggggttttattatgttagttaggatggtttttattttttgattttatgatttgttcgttttggttttttaaaggaatagttttttaaatataaattcggttgaaaattattaagtattaaaaaaaatagggtatgattttatttagtgttattttataatatatatatttgggttataaagttagaaaattaatggaatgagttagaaatagttatcgtaggaggtataaggttgtttgagttggtttataattatttatagagaggtgtgtttgggttgtatttagaatatattttattttgtttgttaaagtggttggatttaagtggatatattttaagagtttttttaggttttgatatcgatgaaagaggaagatggaaagttgtttataggatttttgtagtatttggtttttttaggttaatgtagatattaaaatattgttttgttattgatttacgatttttgttttagtttttttaatattggaaataagtgtttaatgtttttagtgatttagtaaatattttagagggtagttttttatattttatgtttttattgttaggtgattgtgggttaatgatagaaaagataaatggaaaatatttggatatttaaagggtaatgataataaattgttttttagatattggagtttgagtatattatttgttgattaaggtaaagatggtaaatgtttttggggtgatttttaattatatatttttttttttgaattttgtattagttgttatatttatatagtgtgatttttttttttttatagttgagtggataagatgtagata

SEQ ID NO: 21 - DNA, 14924 bp, Artificial Sequence
  chemically treated genomic DNA (Homo sapiens)
  unsure (208..209, 211, 213, 227)
ggttttatagtgttatttggtaatgttatagaattagattagagaaaatgggatttttttattgtagtgtgtttaatgatttttgtaaagagtatagtataaaaaagttttattagtttgaagatttattttgattgaattgtaggatttttgtttgggtttcgtgtattttattaaaatgaaataaagtagttatatttaaattttnnnntntttttttttttttnggagacggagttttgttttgtcgttaggttggagtgtagtggtgttattttagtttagtgtaatttttattttttgggtttaagcgatttttttgttttagtatttttagtagttgggattataggtggttattattatgttcggttaatttttggattttttcggtagagatggggttttattattttggtttattgtaattttcgttttttgggtttaagtgattttttttttttagttttttgagtagttgggattatagttatcggttattatgtttggttaatttttatagttttagtagagatagggttttattatattggttaggttggttttaaattttttatttaaggtgattcgtttgttttgggtttttaaagtgttgggattattaggtgtaagttattgcgtttagttataatatgtaagaatttttaaagtaattttttttggtatatagaagattagaaatataaagttttaggttgggtgtggtgatttatgtttataattttagtattttgggaggttgaggaggcggattatttgaggttagtagtttgatattagtttggttaatatggtaaaattttatttttattaaaaatataaaaattagttagaagtgtttttaggcgtttgtaattttagttatttgggaggttgaggcgggagaattatttgaattcgggaagtagagattgtcgtgaatttagattacgttatcgtattttagtttgggcgataagagtaaaatttcgttttaaaaaaataaaaataagggtttattttttttttatttttatttattgtttaagttaggatttagtgaaggtaggtagttgatttttgttgaataaatgaaatgtttagttaattattattatttttatttttatttttgagatagagtttttttttgttgtttaggttggagtgtagtggtgtaattttagtttattgtaatttttattttttgagtttaaacgattgttttgttttagttttttaaggagttgggattataggtgcgtgttattaagtttagttaatttttgtatttttagtagagatagggttttattatgttggttaggatggtttcgattttttgatttcgtgatttatttgttttggttttttaaagtgttgggattataggtataaattatcgtgtttggttttatatttttttttttttataagtagagatggagttttattatgttggttaggttggttttaaatttttgattttaagtgatttatttgttttggttttttaaagtgttgggattataggcgtgagttattatatttagttaaagatgtttgattgtaattttaaaattatatgtttttattattattattattattattattttgaggggataggattttattttgttgtttagattggagtgtagtggtataattttagtttatcgtaatttttgttttttgggtttaagtgatttttttgttttagttttttaagtagttgggattataggtatgtgtttttattgtttgtatttttagtaaagacgggtttttattatgttggttaggatggttttgaatttttgattttaaatgatttattcgttttgattttttaaaggcgtgagttagcgggttcggttgttttttttatttttaaagaaatatttagtattaaggaaatgtaatgagagagagaaaatttaatttttttattttttttttggtttttatgatgtttaaagatgatttaaggaggtatagtagtttgtttttggttttgtgtttttgtgggttaacgggtatagtttaggaggtacgggagaatttttttaggggaatttttggagaagtggtttgataatatatttgtatgtttttttgtgttttataggttttatattagtttggatattttaagaaaatgttatgaggggattagacgtttaatagatttattggggtaaatgtttgtgagggaaaagagggagggaggtagaagagattatagagttgttagattataatgtaggattgatttttgtaaaggatagaaggaggaagatggggtaggaagttttttatgattgtgtagtcgaaggaagttttagtaaagtttatggggagttattgaagtaaagttatttattaaaggaagttgatttgtaggaatcgattttaaggtttttgttttgtttagttattggttgggaatagtttgtaggatgtgtggttttagtgtaaagttgtggtagatttaaagtattgcggttggggtttttagttaattaaattattatagtaggtttgaaagatgtatttttatggttgttacgttattaacgagtattttaagtagtatttttttttttttttttaattttatggtgatagtttagaaatgtaggttatatatgaattattttttttatttgtagttggttatagataggataaaagatttaaagttattttatatgtggatggaaaaaaaaagtgaatttaatttttttagcgattatgagttatttttttttttttttatttattgtaaatttttttttaggattgttgttatagttaaattaaatgagatttgtattttatttatgaagttatatttttgataggtaaagagatgattgggaggttaaattttttattagtttataaaagaataatgaggaattagttttgattaggtacgtacgttttattaggtatggtgatagaggttttatataggttatttttttgaattttattttaattttttgaggttaatatgtattgttttattttataaattaagtatagatttaaggtatatattgagtaaagaaagagagatttggttgggattgagtttaggttttttgattgtaagtttagtgttttttttggttttgtaatttttaatttatatatcggatagtttatttgagttaaaaatgtgaattaagttaggtttaaagtagaattttgttttttattagaaattttagagtaggtggaaggtgaagattaaagaaggtatttttttttttttttttttttttttttttttgagatggagtttcgttttgtcgtttaggttggagtgtagtggtataattttagtttattgtaagtttcgttttttgggtttaaaggatttttttgttttagttttttaagtagttgggattataggtgttcgttattatgtttggttaattttttgtatttttggtagagatggggttttattgtgttagttaggatggtttcgattttttgatttcgtgattcgttcgttttagttttttaaagtgttgggattataggggtgagttatcgtgtttggtttaaagagggtattttttttttttttttcggtattatttttatttaattataaatgattaagggcggtattgttagagttatttcgagaggttttgttttttgttatttaggttgttttgtagtttttattttaaattgtcgttatttcggtttatttcgtggatggcgtttaagattttttttaaatttgaaatttatagaattattttaaagtgaataatttagtggtatttagtattttcgtagtgttgtgtaatttttatttttatttagttgtaaaatatttttttttttttttttttttggagatagagtttcgttttgttgtttagattggagtgtagtggcgtgattttggtttattgtaatttttgtttttcgggtttaagtaatttttttgttttagtttttcgagtagttgggattataggtatacgttattcgtttggttaattttttgtattttagtatagacggggatttattatattgtttaggttggttttaaatttttgagtttaggtaattcgttcgttttgtttttttaaagtgttaggattataggcgtgagttaacgcggtcggttttgtaaaatatttttattatataaaagaaaattttttatttattaagtagttatttttttttttttttagtttttgttaattattaatttgttttttattttatggatttaattgtttggatattttatagaaatagaattatataatgtatgattttttttgtttggtttttttttattagtttaatgtttttgaggtttatttttgttgaagtatgtattagttttttattttttttttgggatgaataatgttttataatttatttattttttcgtttgttgatgaatatttgagttgtgtttatattttggttattgtgaatagtgttgttatgtatattcgtatgtaagtatttgagtatttgttgggtgtatatttatgaatggaattgttgggttttttgataattttgtatttaattttttgagaaattgttaatatttttataggggttgtattattttatatttttattagtaatttataaggattttaatttttttatattttgtatttaagatttgtaaagttgaattaattataggatgaggaagtggtttttttgaaatattttttttttttatattttaaatttttttttttatatatgatatgaaatatagtttacgtacgaaagtgattaggaggaaggatattataaagtgatgtaaatagaaattttattagtttttatgtattattatgtgttataatttagttaagtttagtgagtatttttagtatattgttttaatagttttaaggtgagttagtttaagattttgttttttattaggtagaagatgatagattgtgaatttggatatatttataggttggtttaggattatttgtagtgcgttttatagatattataatttggattaggtttaagtaaaacgtttagagtgttataaaatgttgcgtttttagtttaaaaagaagtggaaaagaatttgaagttatgtttggataatgttaatgttgtgttcgtagatattgttagaatattatttaattaagtgatggaaaaggagtttgaagacggtattattaattggggaagaattgtaattatatttgtatttgaaggtatttttattaagaaatttttacgatagtaaattgtttcggatgtggatatttataaggagattttatattttgttgcggagtttataatgaataatataggagaatggataaggtaaaacggaggttgggtatgtgtgatggaaaaattttttattgtttttttttgtgaaatagaaattgagaatttttttgttagttaaaataataataaaatattttatttaagaatattattttttttgggtggtttgttttaatttttaaaataaaaatatattttttggtttatttttaatgaatttttgaatttgaattttatagttggaaagtatttatgtttttagtttttatttttaatagtataaattatagtagtgagttttggggattaataaagtattttttttatgtagttttataattagttgtgtatatattttaatttagtatttagtttttgttagggttgttatgatagtatagatagtatagaaatttttataattagtatagaaagttgttattagatgttgttatttttaggtatttatgggttgtaaaagataggtgtaaatttttgtaagtttatcgtttataaattggtgttttttagtttattaatatataataaatagtaatatatattaatatatagtaaattatattatatataatatataatatattattattaataataaatttcgggttgttaaagtttgttgattaaaatataatatattgtatgattagtaagaatttttatttaagaatttttaaataaaaatttattttattattagtgtttaaaaaagttaagattatgtagaggtttgtgttgaaatttatgttggtaaaaagtttgatatagttggatgtatatggttttttttatattttaatatatttaataattatttttttaaagtatttaagtgtttattgattttttttttaacggtttttattttttttaagaggtaattattgttattaattattttgtatgtaaaatatgtttattgaatttatttatagaaaataaataatatttttttgtaaaatattttttgtaaaaaaagttttatataaaatgtatatgtatgtttatgtatatgttttatataatatatatgttatattatataatatatattttttttatatatatatatagattttttatgtatatatataaattttgtatatatatttttatatgtgtatatgtaaaaatagtatatggtattaatgttgttatttatttttttatttagaattatttaaaatagtattattaagagtgttgtgtatattttgttatatgtaagtgttgtagagtatttggttatttttagttgatagttgtttaggttatttcgagtttgttgttatatataatgttttattgaatattattttacgtaaatttttttttgtgcgtgtgtgtagttttttagggtggatgttgggttgtagatgttgggttatggtgtatatatattttttaatttgttaggtttttgttttttaaagtggttttattaagttatatttttattagtagttcgttaggatatgtttcgggatttttttattttagttgattaatagtaggttgttgtaatttattataatttttttaatttgttgggttaaaaatatagagtttattttgttttaatttttgtttttttgatttttagtaaggttaattttttttttatattttgagtatttttttatatattaattgattatttgtaaatgtagggaattgtttgtttatattttttgtttattttttttttattttgttttttttttattgatttgtaggaattttttgaatattttggatataaattattatttttattattgtttaaattttttgagatagagtttttatttttgttgtttaggttggagtgtagtggtgtgattttagtttattgtaatttttgttttttggtttcgagtaatttttttgttttatttttttaagtagttgggattataggtatgtgttattatatttagttaattttgtatttttagtagagatagggttttattatgttagttaggttggtttcgaatttttgatttcgggtgattttttttttttggttttttaaagtgatgggattataggcgtgagttatgtatttaaattatttttatgtatgtggtagatattttttagtttgttgattaacgttaatgatgtttttggttattataaatgtttaaaagtttgttgtaattaaatttattgattttttatttgatgttttttttattttgtttaaggtttttttgtatgatagagtttattgtagttattttttttttttaattattttttttttggaatttagttttttttaattgagtttgattgaggttgggcgaattatgtgaaatgttttgttatgttttttttcggttggttgtgggaggttatatttgaggattggtggaaatttagttgtattgtgtagattttaggtgaaggtaaatgttttttggtatagaggattatagatgagtttgtagagaaatattttattagtttgtaggttttatttgggtttggattgtatttttaacgtttagtataatatttggagtatatagatagtgaataaatgttagttaaaaatttaatttttttataataaattttgtgagtttttggaatttattgttagtaagaggtgtggaattgtttttgagaatttttagtagtatttttattttttaagggtggtatagatgtaaatatgagtgtggtcggatgaatttttttcgagtgtagatataaatatatatattgtttgtacgtgtatatatttagtttttttaaagtttttaagtttttttttttttttaaaaaaaatatttgaatagtttaagttgtagatatgaaataaatatttttggaaatgttattttaaagtaatttttatgtcgtttttttagtttagatgagatattgattttgttaacgataggtagtgtttttttgagttagtgtaaattggtatggaaaattgttattatttttttatagtgatgttgataaatttgtttaaatgaatgaatttatttttgaatgatttattttaggggaaatggtataattatatatttatgttggtagagttagtggtttataagaagaggtaagagtagagaaggtatttatagttttattaagatgtgagtatatataatttataatttaattaaatgttaaaattgtttagagattttatgaaaattttgaattaataatgcggtatgtgtcgggtgtagtggtttatgtttgtaattttagcgttttgggaggttgaggtgggtggattatttgaggttaggagtttaagagtagtttagttaagatggtaaagttttgtttttattgaaaatataaaattagtagggtttggtggcggatgtttataattttagttatttaggaggttaaggtaggagaattatttgaatttgggaggcggaggttgtagtgagtcgggattgtgttattttagtttgggtaatagagtgattttattttaaaaaaaaaaaaaaaaaaaagcggtatgtgagtatagtatagatgtttagagtattaatttagaattagatagatttggttttatttttgggttcgagtgtttattatttgtgtgaattgtataagttgtttaatttttttacgttttgtttttttatttgtaaaaataggaaaatattgtaatttatgttttgggattggtataaggattaaattagttaatatatgtaaagtatttgaaataatttttgaaaatgagtatttaatataagtttaggatttttgtttattatgtaaaatagattttttaatgggaagaaacgagattggtttattagtaataggatttataatttttttcgttatttttttttttttttttgttagttgttttttttttttttttgtttttttgtttttttgtttttttgtttttttgtttttttttgtttgtggttttttatttttttttttgtttttttttatatttattatggtttttttttgttcgtttttttaattggaagtgttgagaggatgtgtttttataagatttgataggagagttagtgttatttggttgtttttagtatttataaggaaaggatggtttttaaaaattattagaatgtttatgagatgaaatttatgtttttttttttgggattatttttttttttgaattagatgggtttttttattttttttttttttaatgaagtatttttttttgtatatgttgggggagtagaaagaatgtttggtatttagttttatatgggagaaattgtgtttatttaatgtattattgtgtattttatgtttagtatagaaggtaataatatttgttgatgggatgatttaacgaattaatattgaaattgaatatttgaattttggtttttttatttattagaggtataattttgggtaaattattgaggtattttgagatttagattttttatataatgtatataataatatgatatgatatatgataatttattatatatgtaatatttaatgaaaataattttatttatttttaaaggaaagttaaaggattataaaatattttttgtaaaatagtgttttttaagttgttaaatattgtgtaattacgagagtcgtgggaaattttaggaagtttagataggtaattttttgtttttttgaagtaggatgtatagttagagttggtgtttttttagtaattattattttaaaggttgggttatatagttaggttaagaggtttttttttttttttttttttttttttgttatttttttattttaaataatagttcggttaatttgaggttaaataaatgggtatatagagatatgtatagatgattaattaagtgtttattttggtaaaggtatttttaaaaggtataaagatttagtagtaaggtgatattattttaagtgtttatatatattttttgattaaataagttttggggtaaaattttttatgttttttgaatttttatttgagattttaaaattatttagtgaaaaataaaagatttttaagttaggtagaaatgtatgatatttaagtgttagttttttaattttgggagttagtttggatttttgttttttatagtttatatttatttattagtaaatttttttggttgtttttttgaaatgttgtaatattttgtgtatttaggtcgttttttttttttatttgattttgttagtagttttttgttagattttatggttttattttttatttgttagaatttgttttttatatagtttttatagcgatatttttaaaatttgaggggtcgggcgtattggtttaagtttgtatttttagtattttgggaggtcgaggcgggcggattacgaggttaggagatcgagattattttggttaatatagtgaaatttcgtttttattaaaaatataaaaaattagttgggcgtggtggcgtatgtttgtaattttagttatttggtaggttgaggtaggagaattgtttgaatttaggaggcggaggttgtagtgaggtgagatcgtgttattgtattttagtttgggtaatagagtgagattttgttttaaaaaaataaaataaaataaaaatttgaattagattatgttttggtttaattataattttttaagttgtttttttattttgggaataaaagtataaaattttgattgtggtttttaaagttttatatgatttagtttttaatcgttttttaaattttatttgtgaattttttcgtgtttttatagttttagtttttttggataagttaagtatattttatttttaaggtttttgtatttgttgttttttttgtttggaataatttttcgttagaagtttgtttggtttattttttttttttgtttaggtttttgttttaaggttgtttttttagagaagttttttttgattattttaattgagaaagtattattgttattttttgtttttttatttaattttattgtttttataatagtttttatgattggatattttattgtatatttatttgtttatttgtttattgtttgtgtttgtcgtgaaaatgtaagtttagtgagggtagggattttgtatgttttttttattattgtgtttttagtgttttaaatggtatttggtatgtggttaatgtttaatgaatattttttgaatgaataaatgaataataatgtttagagaagtgggagtaatataatggtgtttgcgtgtattttgtttgtttgtttgtttttttgaaatagggttttgttgttatttaggttggagtgtagtggcgtaattttggttaattgtagtttcgatttttagggtttaagtaatttttttattttagttttttaaagtgttaggattataggtttgagttattgcgttcggttgtttgtatttttaaaaattttgagattttgattttttttggattattgatattgtatattattttatgttttaggtttttttgtaattaaggtagttgaatttaataaattattattatttttagaaataataaggtttgaattatttttatttattattatattattgataggatattgaatttttgtttgtatatttatttttatataatggttttaagatataaatagtattattaaagaaaatatatttgaaaataatatttttgaaaggaagaaaagttatttttattattttaatatatttatatgtagatattgtatgtaattataattagggtgtataagagtttttttttgtgatatattgtagatatttttaatattgttttatatattttatgttaatattaggtattaatttttaatgtttatagaatattttattaatttgttatattataatttatttaattaatttttaattgttagataatttggttttttcgagttttttttttttagatataatgttttaatattgaagtatgggtatgtttttttggtgttttttattttttaatattttagaagattgttttatgataaatttttaatattggaatgattggtttataagatgtgtgtataattataatattttagtatattggaaaatatattttttttttaaaagtattatattaatggaataatgttataataaatttaatgatgtgggtggtattattaataattttgaggtttgttaggtataaaataataaagttaatttaataggtttaaaaaataataagattgtgttaaaagtatatttttaattgttattagtgttttttttatatatttgttaataatttatatttttttttttaatggttttttttttttaaattattaagggtttgaggattttttgttatatttgaatgaatttttttatgttatatgtaaatatttttttagtttattgtttttttaattttaattttttatagtttaaaaaaattttaggttaggtacggtggtttatgtttgtaattttagtattttgggaggtcgaggcgggtggattatgaggttaagagatcgagattattttggttaatatggtgaaattcggtttttattaaaaatataaaaattagttgggtgtggtggcgtgtgtttgtatagttttagttatttgggaggttgaggtagaggtagaagaatcgtttgaatataggaggtagaggttgcggttagttgagatcgcgttattgtattttagtttgggtggtagagtaagattttgatttaaaaaataataataataaattttaatttttttttggttgaatttattatttttttttttgtttattgttttttcgatattgatgtatataaggtgatatattatgattgtttaatgataatagataatgattattgttataataataaaaattatgttgggtgcggtggtttatatttgtaattttagtattttgtgaggtcgaggtgagtggattatgaggttaggagtttaagattagtttggttaatatagtgaaatttcgtttttattaaaaatataaaaattagtcgggtatggtggtgcgcgtttgtagttttagttatttaggaggttgaggtaggagaattgtttgaattcgggaggtagaggttgtagtgagttgagatcgcgttattgtattttagtttgggtaatagagtaagattttattttaaataataataataataattttagagggttttattatatttgcgaaatatggggtttatgaaaattttaggaaggggagtaatgaagtggatattttttgagagtgtataggaaattatgagtatgtattggtaggagggaaagaggaagaagagagagggttagttttttttttttgttaaggtatgatagtatgttttagagtacgatgtatatttaatacgtaggtagaaaatggtttttttaggtagttttttaaatgaaatttttttggttggtggtatttatttgttttgttagtgatgtttataaaatgattttaaggtatcgtagagttttcgagttatttttaattattaaagagttatgttcggtttatattttaatattagttatattgggttttgagttatttgtaggtatttgtaattttaaggttttgaaatttgtaaggtgaagacgtaaatgtttgttagatgattatttgaaaaaattattttaataattttttaatttttttggtatttgtttggaaatgtatggagtggaaagaagtagggtgtttatatttttatttaagtttaggtattaacgggttggttaattttagataatttatttttttgggtttcgatttttttatttgttaaaataatggagggttttaggttagatgattttagagatagtttttggtgaggattatttgattatagattgtaaattaattaaataaaatgtttagttaattgggttattttatatttttaaaattatgtttgattataaagagagtagattataaaataaattattaatttttttatagttttaaaggtattagtttaatttggatttattgtgagtttttatgatttttaatataatgtagtttatagtataatataatttatattatatatataagtgtattgaaattaatgttggataattgaataagaacgagaaaaaaaaaggttttttattttttagagttgtgtttgttgtttattatggaagtgaaatgtggttagtttgaattaagatgtattgttaagtattaaatatttattggatttcgaaggtttgttatgaaaaaagaatattttattaatgattttatattgattatatattaaaataaaaataattttaaaattattttaaaagttagttttatttatttttttattttgtaaaatatggttataaaaaaatttaaattatagacgtaggttatattgtatttttgttagatgttgttgtttaataggggtagaaggggtagaagattaattatttgtattatttaaatgaaaatatttttgttttttattttagtatatttaatttttaatgatgtttaaagtgttaaatttatttttttatagg

SEQ ID NO: 22 - DNA, 14924 bp, Artificial Sequence
  chemically treated genomic DNA (Homo sapiens)
  unsure (14698, 14712, 14714..14715, 14717)
tttataaaagaataaatttaatattttaaatattattggagattaagtatgttggaataaaaagtaaaaatatttttatttaaatagtgtaaatagttaattttttattttttttatttttgttaagtagtagtatttaatagaaatatagtgtgatttacgtttgtaatttaaatttttttgtagttatattttataaagtaaaaaaatagataaaattaatttttaggatagttttagagttatttttattttaatatgtaattagtataaaattattaatgagatattttttttttataataaattttcgaaatttaatgagtatttagtatttaatagtatattttaatttagattagttatattttatttttatagtggatagtaagtatagttttagaggatagaaagtttttttttttttcgtttttgtttaattgtttaatattgattttaatgtatttatatatgtaatatgaattatattatattgtaaattgtattgtattgaaaattatgagaatttatagtaaatttaaattaaattaatatttttgaagttatgaaaaggttgatagtttattttataatttattttttttgtgattagatatagttttaaaaatataggataatttaattaattggatattttatttagttaatttataatttgtagttaaataatttttattaaaaattatttttgagattatttagtttgaagttttttattattttaataaatgaggaaatcgaggtttagaaaaataagttatttaagattagttaattcgttggtgtttggatttggatgagaatgtgaatattttatttttttttattttatatatttttaaataagtgttaaaagaattagaaaattgttaaaataatttttttaaatggttatttggtaaatatttacgtttttattttataggttttagaattttggggttataaatgtttgtaagtagtttagagtttagtgtaattaatattgaaatgtaaatcgagtataattttttgatagttgggagtgattcgagagttttgcggtgttttggaattattttatgagtattattggtaaagtagatgaatattattagttagggggattttatttgaaagattgtttaagaaagttattttttgtttacgtgttaagtgtatatcgtgttttgagatatgttgttatgttttgatagaggaaggaaattggttttttttttttttttttttttttttttgttagtatatatttatagttttttatatatttttaagaggtatttattttattatttttttttttagaatttttataaattttatgtttcgtaagtataatgaggttttttgaaattattattattattatttgagatggagttttgttttattgtttaggttggagtgtagtggcgcgattttagtttattgtagtttttgtttttcgggtttaagtaatttttttgttttagttttttgagtagttgggattatagacgcgtattattatgttcggttaatttttgtatttttagtagagacggggttttattatgttggttaggttggttttgaatttttgattttatgatttatttatttcggttttataaagtgttgggattataggtgtgagttatcgtatttagtatgatttttattattatgataatgattattgtttattattattgagtagttataatgtattattttatatatattaatgtcgaaaggatagtgaataaagaaaaaaatgatgaatttagttagaaagagattaaaatttattattattattttttgagttaaagttttgttttgttatttaggttggagtgtaatggcgcgattttagttggtcgtaatttttgttttttgtgtttaagcgatttttttgtttttgttttagttttttaagtagttaggattatataggtatacgttattatatttagttaatttttgtatttttagtagaaatcgggttttattatgttggttaggatagtttcgattttttgattttatgatttattcgtttcggttttttaaagtgttggggttataggtatgagttatcgtgtttagtttaaaatttttttaaattatgaaaaattaaaattaaaagaataatagattaggaaaatatttatatatagtatgaaagagtttatttaaatgtaatagaaaatttttaggtttttaatagtttaaaagggaaagattattaaagagagaaatataaattattaataagtatatgggaaaaatattaatagtagttaaaaatgtatttttaatatagttttattgttttttagatttattaaattggttttgttattttatgtttagtaaattttaaaattattaatagtattatttatattattaagtttgttgtgatattgttttattgatataatatttttggaaagaaaatatgttttttaatatgttagagtattgtaattatatatatattttatgaattagttattttagtgttagaaatttattatgaggtagttttttaaaatattggagggtagggggtattagaaaagtatatttatgttttagtattgaagtattatatttaaaaggggaaaattcgaaaaaattaaattgtttaataattgggaattggttaagtaaattatgatataataaattaatgaaatattttgtagatattagaaattaatgtttaatgttaatatgaaatatgtgagatagtgttgaaaatatttataatatgttataggaaaaaatttttgtgtattttaattataattgtatataatgtttgtatgtggatatgttagggtgatgggagtgattttttttttttttaaaaatgttatttttaaatatattttttttaatgatgttatttgtattttaaaattattatataaaaataaatatataaataaggatttaatattttattagtaatgtagtagtaaataagaatagtttaggttttattatttttgggaatggtgatagtttgttaaatttagttattttggttataagaaaatttaaagtataaaataatatatagtattaatagtttaaagaaaattaaaattttagaatttttaaagatataggtagtcgggcgtagtgatttaagtttgtaattttagtattttgggaggttgagatgggaggattgtttgagttttggaggtcgaggttgtagttagttaagattgcgttattgtattttagtttgggtgatagtaagattttgttttaaaaaaataaataaataaataaaatatacgtaaatattattatgttatttttatttttttaaatattattatttatttatttatttaggaaatatttattgagtattggttatatgttaggtattatttaaagtattggaaatatagtggtgaagaaagtatataggatttttgtttttattaagtttatatttttacggtagatatagataataaatagataagtaagtaaatatgtaatgggatgtttagttatgaaaattattatgaaggtaataaagttgggtagggagatagagagtggtagtagtatttttttagttggggtgattaaggaagatttttttgaggaggtaattttggaatagaggtttgagtaaagggaagaagtaagttaggtaaatttttggcggaaaattattttaggtagagggagtagtaagtgtaaaggttttgagggtggaatgtgtttagtttatttaaggaggttggagttatgagagtacggagggatttatagatgagatttgagaggcggttagaggttaggttatgtagggttttgaggattatagttaggattttgtgtttttgtttttagggtaaaagggtagtttggagggttatgattaggttaagatatgatttaatttaagtttttattttattttatttttttgagatagagttttattttgttatttaggttggagtgtagtggtacgattttattttattgtaattttcgttttttgggtttaagtaatttttttgttttagtttattaagtagttgggattataggtatgcgttattacgtttagttaattttttgtatttttagtagagacggggttttattgtgttagttaggatggtttcgattttttgatttcgtgattcgttcgtttcggttttttaaagtgttgggaatatagatttgagttaatgcgttcggttttttaagttttaaaaatatcgttgtgggggttatgtggaaaataaattttagtagataaaggatggaattatggagtttggtaggaggttattgatagagttaagtgagagaggaaggcggtttagatgtatagggtattatagtattttaaaggggtagttagggggatttgttgatggatggatgtgggttatgagagataggagtttaggttgatttttaaggttagagaattagtatttaagtgttatatatttttgtttgatttgagggttttttattttttattaaatgattttagagttttaagtaaaaatttaaaagatatagaaaattttgttttaaaatttatttaattaaaggatatatatgaatatttgagatagtattattttgttgttagatttttatattttttggaaatgtttttgttaaagtgaatatttagttaattatttatatatgtttttgtgtgtttatttatttggttttaaattgatcggattattatttagagtaagaggatgataaagaaaaaaaaaaaaaagaaaaaaaattttttgatttaattgtatgatttaatttttaaaatggtggttattgggaaagtattaattttgattgtatattttattttagaagggtaaagaattatttatttaaattttttggaattttttacgattttcgtagttgtatagtatttgatagtttggaaagtattgttttataaaaagtgttttataattttttagtttttttttaaaggtaggtaagattgtttttattaaatattatatatataataaattattatatgttatgttatattattatatatattatataaggaatttgagttttagagtattttagtaatttatttaaggttatatttttagtgagtgagaaaattagagtttaaatatttagttttagtgttggttcgttgaattattttattagtaaatattgttattttttatgttaggtatgaggtatatagtgatgtattaagtagatataattttttttatgtggagttgagtgttaagtattttttttatttttttagtatatgtagaggagaatgttttattgaagggggaggaagtaagaagatttatttggtttaaaaggaagggtgattttaagagaagagatatgagttttattttatgaatattttaatggtttttaagaattattttttttttatgaatgttggaggtagttaaatggtattagtttttttgttagattttgtgagagtatatttttttagtatttttaattaggagagcggataggaggaaattatggtaaatatggaagaggataaaaagagagatgagaagttataaataaaagaaggtaggaaggtaggaaagtaggaaggtaggaaggtaggaaggaaggaaagataattgataaaaaggagaaagagaataacgaaagagattatgagttttattattgatagattagtttcgtttttttttattaggggatttgttttatatggtaaataaaaattttaaatttgtattgagtatttatttttaggaattgttttaagtgttttgtatatattaattaatttgatttttatattagttttaggatataggttgtaatatttttttgtttttatagatgaggaaataagacgtagggaagttaagtaatttgtataatttatataggtagtaagtattcgagtttagaaatgaagttaggtttgtttgattttgagttggtgttttgaatatttatgttgtgtttatatatcgtttttttttttttttttttttgagatggagttattttgttgtttaggttggagtggtataatttcggtttattgtaattttcgttttttaggtttaagtgatttttttgttttagttttttaagtagttgggattataggtattcgttattaggttttgttaattttgtatttttagtagagatagggttttattattttagttaggttgtttttgaatttttgattttaggtaatttatttattttagttttttaaagcgttgggattataggtatgagttattgtattcggtatatatcgtattgttgatttaaagtttttataaagtttttgggtaattttaatatttaattaaattatagattgtatgtgtttatattttgataaagttgtaagtgttttttttatttttatttttttttgtgggttattgattttattagtataggtgtgtgattgtgttattttttttgaaatgaattatttaagagtaaatttatttatttaagtagatttgttaatattattatgaaaagatgataatagttttttatgttagtttgtattgatttaaaaaagtattgtttatcgttgatagaattaatgttttatttgagttgggaaagcggtatggagattgttttgaaatgatatttttaagagtatttattttatgtttataatttgaattatttaggtgttttttttaaaaaaaaaaaagagtttggaaattttagaaaggttgagtgtgtgtacgtgtaggtaatgtgtgtatttgtatttatattcgggagaggtttattcggttatatttatgtttatatttgtattatttttgaaagatgagggtattattagaaatttttagagataattttatattttttgttaatagtgagttttaggagtttataaaatttattgtggagaagttaaatttttaattaatatttatttattgtttgtgtgttttaagtattatgttaagcgttggaaatataatttaaatttaaatagagtttgtaaattagtagagtatttttttgtaggtttatttgtggttttttgtgttagagaatatttgtttttatttgaaatttatatagtgtagttgaatttttattagtttttaagtatagttttttatagttaatcggaagaaaatatgataaaatattttatatgattcgtttagttttagttaggtttagttagaaagaattaagttttaggaagaaggtgattgagaaaggggagtagttgtagtaagttttattatgtaggaaggttttaaataaaatgaaaaaggtattaagtaaaagattaataaatttgattgtaataaatttttaaatatttataatgattaaagatattattagcgttaattagtaaattaaaagatatttgttatatatataaaaataatttgggtgtatggtttacgtttgtgattttattattttgggaggttaaagggggaggattattcgaggttaggagttcgagattagtttgattaatatggtgaaattttgtttttattaaaaatataaaattagttgggtgtggtggtatatgtttgtaattttagttatttgggaggatgaggtaggagaattgttcgaaattaggaggtagaggttgtagtgagttgagattatattattgtattttagtttgggtaataagaatgaaaattttgttttaaaaaatttaaataataataaaaataataatttgtatttagaatatttaaagaatttttataaattaataagaaaaagataaaataaaaggaaaatgggtaaagggtgtaaatagataattttttgtatttataaatgattagttaatatatgaaaagatgtttaaaatgtaaaaaaaaaattaattttattagaaattaagaaaataagaattgaaataagataaattttatatttttagtttaataaattaagaaaattatgatgaattgtagtaatttattgttagttagttggggtaggagaatttcggggtatattttaacgagttgttgatgggagtgtaatttggtagagttattttggagggtaaggatttaataaattaaaaaatgtatgtatattatgatttagtatttataatttaatatttattttagaaaattatatatacgtataagggaagatttacgtaaaatgatatttaatgaagtattgtgtgtgatagtaaattcgaaataatttaaatagttattagttagaaatggttaggtattttatagtatttatatataatagaatatatatagtatttttaataatattattttaaataattttgggtaaaaaaataagtggtagtattagtattatgtattatttttatatatatatatgtaaaaatatgtatgtaaaatttatatgtatatataaaaaatttatgtgtatatgtaaaaaaggtatgtgttatatggtataatatatatgttatgtaaaatatatatataagtatatatatatattttatataaaattttttttataaaaaatgttttataaagaagtattgtttattttttatggatagatttagtaggtatgttttgtatgtaaaataattgataatagtggttattttttgggagaggtgaaggtcgttggagagaggattaatgaatatttaagtgttttaaaaaaataattattaagtatattggaatataaaggaaattatatatatttagttgtgttaggttttttattaatatgagttttaatataggtttttatatagttttggtttttttaggtattgataataaagtaaatttttatttgaaaatttttgaataaaggtttttgttggttatatagtatattatgttttaattaataaattttaatagttcggaatttattattagtaataatgtgttatatattatatgtaatgtaatttgttatatattaatatatgttattatttattatgtattagtaaattgaaaaatattaatttgtaagcgatgaatttataaaaatttatatttgttttttgtaatttataaatatttaaaaataatagtatttgatagtaattttttgtgttgattgtagaaatttttgtattgtttgtattgttatgataattttagtaaaagttaagtattagattagagtgtgtgtatagttgattgtgaagttgtatgagagaggtgttttattaatttttaaagtttattattgtaatttatattgttaagaataaaaattgaaaatataagtgttttttaattataaagtttaagtttaaggatttattggaaataagttagaaagtatatttttattttaaaaattaaaataaattatttaaggaaaatagtatttttaggtaaagtgttttgttgttgttttaattagtaaggaaatttttaatttttattttataggaaagaataatgaagaatttttttattatatatatttagttttcgttttgttttatttatttttttgtgttatttattatgaatttcgtaataaaatatgaaatttttttataggtatttatattcggggtaatttgttgtcgtagaagttttttgatgagaatatttttaaatgtaaatatggttataatttttttttagttaatgatgtcgtttttaaattttttttttattatttggttgaatagtgttttggtagtgtttacggatataatattaatattgtttaagtatgattttagatttttttttatttttttttggattgagaacgtaatattttgtagtattttggacgttttgtttggatttgatttaggttgtggtatttgtaggacgtattgtagatagttttgagttagtttgtaaatatatttaaatttatagtttgttattttttgtttggtggagagtaaagttttgagttggtttattttgaagttgttgaggtaatgtgttgagaatgtttattgagtttgattgagttatgatatatgatgatatatggaggttggtggaatttttgtttgtattattttataatatttttttttttagttattttcgtgcgtaggttgtgttttatgttatgtatgaaagagaaagtttaaaatgtgaaagaggaaaatgttttagagaagttatttttttattttgtgattaatttagttttgtaagttttaaatgtaggatgtggagaaattagaatttttgtagattgttggtgggaatgtgaaatggtataatttttgtgaaaatgttggtagttttttaaaaagttaaatatagaattgttaaaagatttagtaattttatttataggtatatatttaatagatatttaaatatttatatacgaatgtatatggtagtattatttataatagttaagatgtggatataatttaaatgtttattaatagacgaaaggataaataaattatggaatattatttattttaaaaaaggaatgaagaattgatatatgttttaataggaatgaattttaaaaatattaggttaatagaaagaagttaaatagaaaaggttatatattatgtgattttatttttatgaaatatttagatagttaaatttataggatagaaagtaaattggtggttgataggggttgagaagaggaaggagtaattgtttaatgggtagaaggtttttttttgtgtgatgaaaatgttttataaggtcggtcgcgttggtttacgtttgtaattttagtattttgggaggataaggcgggcggattgtttgagtttaggagtttgagattagtttgggtaatatggtaaattttcgtttgtattaaaatataaaaaattagttaggcgggtggcgtgtgtttgtaattttagttattcgggaggttgaggtaggagaattgtttgaattcgggagatagaagttgtagtgagttaagattacgttattgtattttagtttgggtaatagagcgagattttgtttttaaaaaaaaaaagaaaagaaaatgttttgtagttagatagaggtggaagttgtataatattgcgaaggtattaaatgttattgaattgtttattttaaaatggttttgtgaattttaaatttaagaaaagttttaaacgttatttacggggtaaatcggagtaacgataatttggaatggagattataaaatagtttgggtggtagagaatagggtttttcgaggtgattttggtagtatcgtttttgattatttgtaattgagtaaggatgatatcgagagggaagaaaaaaatattttttttgggttaggtacggtggtttatttttgtaattttagtattttgggaggttgaggcgagcggattacgagattagaagatcgagattattttggttaatatagtgaaattttatttttattaaaaatataaaaaattagttaggtatggtggcgggtatttgtagttttagttatttgggaggttgaggtaggagaattttttgaatttaggaggcggagtttgtagtgagttgagattgtgttattgtattttagtttgggcgatagagcgagattttattttaaaaaaaaaaaaaagaaaaagaaaaagaaaatattttttttggtttttattttttatttattttagaatttttgatagaaaataaaattttgttttaagtttgatttaatttatatttttaatttaggtaaattattcgatgtgtggattagaaattgtaggattagaaagagtattggatttatagttagagggtttggatttagttttagttaaatttttttttttttatttagtatgtattttgggtttgtgtttaatttgtaaaatgaggtaatatatgttgattttagagggttgaggtgaagtttaaagagatgatttatgtaaagtttttattattatgtttggtaaaacgtacgtgtttaattaaagttagttttttattgtttttttgtggattaatgaggaatttggttttttaattatttttttatttattaaggatataattttataggtgaaatgtaaattttatttgatttagttatggtagtaattttgagaaaaggtttgtagtggatggaagaaaaaggagataatttatggtcgttggagaaattgaatttattttttttttttatttatatatggagtgattttgagttttttattttgtttatgattagttgtaaataggaaaaatgatttatatataatttgtatttttgaattattattatagggttaaggaggaaaggagaggtgttgtttagaatgttcgttaatagcgtggtagttatgaaaatgtattttttagatttattgtggtggtttaattgattaagggttttagtcgtagtgttttgaatttattatagttttgtattgaggttatatattttataggttgtttttagttaatgattgagtaaagtaggaattttaagatcggtttttgtaagttaattttttttgataggtaattttgttttaatgattttttatgggttttgttgaaatttttttcgattgtatagttatggaagattttttattttatttttttttttttgttttttgtagaggttagttttgtattgtagtttgatagttttgtagttttttttgtttttttttttttttttttttataggtatttattttagtaaatttgttagacgtttaatttttttatgatatttttttggagtatttagattgatataggatttgtagagtataaaggagtatatagatatgttgttaagttatttttttaggaatttttttgggaaagttttttcgtgttttttagattgtgttcgttggtttataggagtataaagttaagagtaggttgttgtatttttttaaattatttttgagtattataagaattagggaaaggatgggaagattgagtttttttttttttattatatttttttggtgttgaatatttttttaaaaataagagaagtagtcggattcgttggtttacgtttttgggaggttaaggcgggtggattatttgaggttaggagtttaagattattttggttaatatggtgaaagttcgtttttattaaaaatataggtagtagaggtatatgtttgtaattttagttatttgggaggttgagataggagaattatttgaatttaggaggtagaggttgcggtgagttgagattgtgttattgtattttagtttgggtaatagagtgagattttgtttttttaaaataataataataataataataatagaagtatgtggttttaaaattgtaattaagtatttttggttgggtgtggtggtttacgtttgtaattttagtattttgggaggttaaggtaggtggattatttgaggttagaagtttgagattagtttggttaatatggtgaaattttatttttatttataaaaaaaaaaaagtataagattaggtacggtggtttatgtttgtaattttagtattttgggaggttaaggtaggtggattacgaggttaagagatcgagattattttggttaatatggtgaaattttgtttttattaaaaatataaaaattagttgggtttggtggtacgtatttgtagttttagttttttgggaggttgaggtaggataatcgtttgaatttaggaggtggaggttgtagtgagttgagattgtattattgtattttagtttgggtaatagagggagattttgttttaaaaataaaaataaaaataataataattagttaggtattttatttatttaataaagattaattatttgtttttattgggttttggtttgggtaatgggtggaaatagaaaaaagatagatttttgtttttgtttttttgagacggagttttgtttttgtcgtttaggttggagtgcgatggcgtaatttaggtttacggtaatttttgtttttcgggtttaagtgattttttcgttttagttttttaagtagttgggattataggcgtttgggaatatttttggttaatttttgtatttttagtagagatggggttttattatgttggttagattggtgttaaattgttgattttaagtgattcgtttttttagttttttaaagtgttgggattataggtatgagttattatatttagtttagggttttatatttttaattttttgtatgttaaaaggagttgttttaaaaatttttatatattgtggttaggcgtagtggtttatatttggtaattttagtattttgggagtttaaggtaggcgaattattttaggtgaggagtttgagattagtttgattagtatggtgaaattttgtttttattaaaattataaaaattagttagatatggtggtcggtgattgtaattttagttatttaggagattgaggaagaagaattatttgaatttaggaggcggaggttgtagtgaattaagatggtgaaattttatttttatcgaaaaaatttaaaaattagtcgggtatggtggtggttatttgtaattttagttattaggggtgttgaggtaggagaatcgtttgaatttaggaggtggaggttgtattgagttgagataatattattgtattttagtttggcgatagagtaagatttcgtttttnaaaaaaaaaaaaanannnnaaaatttaagtatagttattttattttattttaatagaatatacgaggtttaaatagaaattttgtagtttaattaaaataagtttttaaattaatgaagtttttttatgttatattttttatagagattattaagtatattataatgaagaaattttattttttttgatttaattttgtaatattattaggtaatattgtggagtt

SEQ ID NO: 23 - DNA, 7231 bp, Artificial Sequence
  chemically treated genomic DNA (Homo sapiens)
ttaattattttaagtaagtttttaaattaagttgggcgtatatatagaggtttaaatttagagatttaagtgaaggtttttattagagtatgtggttgaaagttagttagtaaatatttgttgagtatttattttgttaggatttgtgttaggtattggataatagagagatgaaagagaattttaggaatttagagttagtatgtgaataggattgtagaataatataggagttgttatagatatgtaaagggttttaggtatattattgttgttgaggtgtttttatggatataggtattatatttagtggtgtattagagaattgatagatttgggtttttagtattttggatttttgaagaaattttttttgttttatgtgagtgatattaaggttattaggaagtaaaggggaggggtatggttttttatggattggttttgtattaggatttgatttttaaagattattgtttataggattttttgttaagattttgagattgttaaagggttgggtgagttagattagtatagtttttaggaaattaaatttgtggatagtatttagttagttgggttatttagttggtgagttgtttagttatagtatagtggagaatttgaaagaaagaaaatggttgggaaatgttataatattttagttaaaaggtttagagtaggaagaaggtgttagaaagttttaggggagggagtggtattttttaagattttgttaggtgtttttttgttataggaaatttagttgttatttttaagcgtttaatgaggttggtggttatgtttattttataggagataagatttagatgaggagattagttttagatttattttatatgattatagagttttaatttaattttagtcggtttgttgtattatagaaataatttgtatttatttttttgggattaggttaagttataggtaatatttggaaggatgtttttgtagcgggggataaaggttttagaatttaaaaattaaaaagaaagttaaaatttagtagataaataaaagttagtttaaggattagtgggtaaaggtgataggggaagtaaaatagagttgagaggaattagtgattgggtgtaatgattattagattgtatatttgtttttcgaagatggtttttagtttaaggtttaggattgggtttttttattggaaggaagtatattggagggtagagaaaaagggagtttatgtttttttttttagttgtagtataagagatgtaattggggattgttgattgtatatgaatatttaataagaagtatgatgtgaacggggttttaagggtacgtttgtaggtttgttagttgttggttttggggtttttttgttgttttaaatagggggtttttatgtgagtatttaaaatattggagtgatttgaagaaagtaaattttagtttttttaaaaggttttaatttgaaaatattattaggaataaatttaatagaaaatgtatataaggtttaggataaagaaaattttgaaagtattgtgaaggatatagaaggaaattggaataaattgaaagatatattaagtttttatataggagtagtgatatagaattaatagtggtaagttaaattaaaaatataatattgttaaaaaatgttattttaagaaaatatattaagagggtttaaaaaaaaagtttatatagggataaaatagttggaagatgttggtaggtagtggggttgagggggtagtgatgtaggggataaggggaagagttatttaattttagtagatattaaaagtcgttataaaattataatagttaaaattaattttgatatatgaataggttagttaagtagaatagaaggtttaaaagtagatttaaatatatacgataatttagtatggtaaatgtggtatttagaattagtgagtaaaaggtagattttttattaaatagtattggaataattaagtaattttcggaaaaagtaaaattgggtttatattttatattataagttaatatatattttaaaatagataatgatttaagtgtaaaaaaaaaaaaaaagttataaaaaattatttataaaaatattataaggaaatgtgggtaatttttttaaatttttgtaatttggattacgaatttaggaattataaacgaagattgataaatttaatgtaaaataagattaataaaaattataagttaaattaaagttttatagattttttaaggttgtagatgtttttaaaaaaaaatgaaaatagaaaagttttgaaatttatttttaaggattaatttttttaatatatagagtttttggaaacggatatgaataaaattaataatttaatagaataatgagtagataatagaataaatgtaaatagttttgaagtataggtagagttttttagttttttttatgattagaaaagtataaattaaagaaggtatttttatttaattagattggtaaaatttttaatgtttgttaatttattttgttgataaggttacgggaaataggtatttatgttatgttgttggagggagtatggattgatataatttttatgaagagtaatttggtaatatgttagaatttttaaatgtatatattttttgatttagtaattttatttgttttgggtaagttattatttttttttgtttcgtttttattttatagagttgttgtaagagttaagcgagatatatatgaagcgtttagtataaagtttttggtatataggaagtgtttttaaaatgtgggttagtagtagaataatagtagttaacgggtattgagattttattatatgttatattagtatattgtgtttggtgttttttatgtatttttttatttaattttttaatttgtgaagtaggcgtaattgattattattagttagttttcgaggagatagaggtataggtatgcgaagtgtgtggtggataggatttgagtttaggtagatgttaagtttgtgatatattgtttttttattaggtgtagtggggtgatgaatattttacgagagggtgtgtagagggttgtagggatatagataagtatatagtttcgtttataataggtggggattatattgattttttggggaaaagatggtttttagtagaggttgtgttattttttttgtttttttttttttttttttttttttttttgagatggagttttgttttgtcgtttaggttggagtagtatagtggggcgatttcggtttattgtaagttttattttttgggtttatattatttttttgttttagttttttaagtagcggggattataggcgttcgttattacgttcggttaatttttatatttttagtagagacggggttttatcgtgttagttaggatgatttcgattttttgatttcgtgatttattcgtttcggttttttaaagtgttgggattataggtatgagttatcgtgttcggtttaggcgtgttcggtttaagttttgttatttttaagataggtaattttgtaatagggttgattgttttttgttttaatttattttaagttttatttttgatttgtgataatagtgtagtataattttaagggtggttgtgaggattaagagagatgaatatggtcgggtatagtggtttacgtttgtaattttagtattttgggaggtcgaggcgggtggattacgaggttagttcgagattaatttgattaatatggtgaatttcgtgtttatgaaaaatataaaaattagttgggtatggtggtacgtatttgtaattttagttatttaggaggttgaggtaggagaattgtttgaatttgggaggtagagtttgtagtgagttaagattgtgttattgtattttagtttgggtaatagagcgagatttcgttataaaaaaaaaaaaaaaaaaaaaaaagagagagagatgaatatttaagttttaagtttttaggtttttataatttatgtttgttgaagtgattcgaataaatgtagatggagtggggtcgagtgggggaaacgttttttagggagagggaatattatattttaaggttatatatttagaaggagtttgagtaatttaggaagggcgtagggtgcggtggttgatggtcggggtggttgatggttttgaggattagttaagaaatttggattatttattaataaaaataaaagagttattatttgttgagggtttgttttgatatttttattaaaattattttagtaaggtagatttaataaatttagttgtatataaaagggaaatacgagaagttatagaagggttgtatataggtaggtgatttgattaatttcgtgttttataaagattttttagattatgtgttggagtgataggaggtattttatcgatttgttttgaattttatattttaaaaaatatatgacgtttattatttttttttttattttataatttatatttattgtagaaaatattaaaaatataagaaagtttgaagaaataaaaaattattattggtattttttagagatattttaattgatattttttttttagtttttttttttttatgtaaaaaatatatagttattagaatgtttgatagaaggaagatggaaagagattattgtgaagcgtttttgatatttttttttttttttttttttatgttattagggttatattaagaggagaggttgatttttttatacgtgttagggaaagttttaattttgcgtagggattttcgtttgttattttcgtcggtttttagggggcgttgtttcgagattgggtggggagggaaagaaggtggtgcgaaaacgcgtttgaatttgggttttgtcgttgttcgtagtcggcgtttttaatatggcggttttttaagacgtttacgttcggatttgtaattaagagattgttaaatttgatttggaggtgaaggcgtttatttaggtattgatttcgggatttttgtcgggttttagtagttttaatttaagttttgttggtttgtgagtttggtagtgttattttcgaattttttttatttggttttttagattataggtttcgttttatggtcggttattttttcggtttttatttggttgtgtttcggtgattgttggttttgatttttttttcgggtgtcgtcggattttttatttttagagtattttattgtttttcgtttttgatttagttattgtttcggggttcggttttgttttttttatttgtagttttggtcgtcgtttcgtttttgattattttataatttatttgttattttgtttggtttcgttttttgacgttgttttagtattttttggtagcgttcgggaggtagttagtttcgttttttgttggttagtttttttggtatttaaggttatttggtacgggaggtatcgggtgaaacgaatgtaatttggatcgtagttgtgattttatgtttgaggaaatcgagtacggcgttaaggtttaggttagaaggtatatttgggttagtggtaaaattgggatttggattgtgaaagttaatttaggaataatattttagagtgttatttcgtttgaatagataggaaatgaagtgtttcgttttaagttatttaagggtagaggtaaaataaacgagtggatttaggtaagaattgggagtgtagatacggttttatgagtttagtaaaaagaaatcgagttttaaattttgtttttgtttgtttgtttttgtttttttgagacggagtttcgttttgtcgtttaggttggagtgtagtggcgcgatttcgattcgcggtaagtttcgtttttcgggttttcgttatttttttgttttagttttttgagtagttgggattataggtattcgttattacgttcggttaatttttgtgttttgtttagtagagacgggattttatcgtgttagttaggatggtttcgattttttgatttcgtgattcgttcgtttcggttttttaaattgttgggattataggcgtgagttatcgcgttcggtttaaattttggtttttaaaaataattatttttaataaagttattaaatattagatgtagatttagagtttgtaataaggtgtggtaaaaagtgtaggaaaatagggttttttagataaattagatgtagaataaattaaattagatgtagaataaataaatacggtgtaaagaagtgtgattaaatgaataagttagagaaaaagtgaaatttgatgtagatatttaaaattttttgaattttatttttttgatgtatatattataaaatttttgggttaattatagaaaaataaataggttttatataaatgaaattatatttttatataatttaaattgtttaggtatttttttgtattttttttaatatttgggtttttgttattgttgatgagaaagattgattatagttggatgtattgcgtttttatcgttttttagtagttttgttaagtgttttatatatatatataatttatgatgttttatgaggtaagtagtgttgtgataaggaaatttagatatagagaatttaaataattttttaggtaattttatatagtttataagttgttatagttaggattcgaatttatttggtttgtttttagagtttgtcgtgaaagttggtattagtaattttgaatgtttagtaatagattttaaatttgtttttaaatatgtttatataaatattttaatttattattaatggtttgtaaaattatattggagaagttaattttattatatgatgttagatatttaaatattttgattttttaagttggaaggatttaaggttttaaagtgatagtattatttttgtatgtttatttttgttgggtatataagttgttttaagttgttttttattggttaggtaatgttttgttaaaatttaggtattaaaaattaggttaaagtagttgtgtttttttttaggtttttatattaatttaatattaatttaaaaaggaatgagaaaaatgtaaatgataatgtttttgtttgtgttgtagaggtaaatagtaaagattaggatgaattatagttagtacgttaatattagttggtttaaattaattttattattgtatggatggtgttattttattttattgttttgagaaaggttttttatttgtttaatgttttttagg

SEQ ID NO: 24 - DNA, 7231 bp, Artificial Sequence
  chemically treated genomic DNA (Homo sapiens)
tttaggagatattgaatagatgaaaggttttttttaaggtaatgaaatgaaatgatattatttatatagtgatagagttggtttagattaattaatattaacgtattaattataatttattttgatttttgttgtttatttttgtaatataagtaaaaatattattatttatattttttttatttttttttagattaatgttgaattaatataaaagtttagaaagaaatataattgttttgatttaatttttagtgtttaaattttaataaaatattatttggttagtaggaaatagtttaaaatagtttgtatgtttaataagaatggatatgtaaaagtgatattattattttagaattttagatttttttaatttggaagattaggatgtttaaatatttggtattatatgatgagattaatttttttagtgtgattttataaattattagtgataagttagagtgtttatatagatatgtttaagggtagatttagaatttgttgttggatatttagaattattggtgttagtttttacggtaggttttggagatagattaggtggattcgaattttggttgtagtaatttatgagttgtgtaaagttatttggaaagttatttaaattttttgtgtttgagtttttttattataatattatttattttatagaatattatagattatgtatgtatgtaaagtatttagtagagttgttggaaaacggtaagaacgtaatatatttagttataattagttttttttattagtaatgataagaatttaaatgttagaaagagtatagaagaatgtttaagtaatttagattatgtgaaaatgtaattttatttgtatgaaatttgtttatttttttataattggtttagaagttttgtaatgtatatattagagaagtgaagtttaagaagttttaaatatttgtattaaattttattttttttttggtttatttatttaattatatttttttgtatcgtatttgtttattttgtatttaatttggtttattttgtatttggtttatttggggagttttatttttttgtattttttgttatattttgttataaattttgagtttatatttaatgtttagtgattttgttgaaaatgattatttttaaaaattaaggtttaggtcgggcgcggtggtttacgtttgtaattttagtaatttgggaggtcgaggcgggcggattacgaggttaggagatcgagattattttggttaatacggtgaaatttcgtttttattaagtaaaatataaaaattagtcgggcgtggtggcgggtgtttgtagttttagttatttaggaggttgaggtaggagaatggcgggaattcgggaggcggagtttgtcgcgagtcgagatcgcgttattgtattttagtttgggcgatagagcgagatttcgttttaaaaaaataaaaataaataagtaaaaataaggtttaaaattcggtttttttttgttgaatttatggaatcgtgtttatatttttaatttttgtttaagtttattcgtttattttatttttatttttaaatggtttaaggcgaaatattttattttttatttgtttaaacggggtaatattttaaggtgttatttttaggttgatttttatagtttaggttttagttttgttattgatttaggtatgttttttaatttaggttttggcgtcgtattcgatttttttaagtataaaattataattacggtttaggttatattcgttttattcggtgtttttcgtgttaggtggttttggatgttaggagagttggttagtagggggcggggttagttgtttttcggacgttattagaggatgttgaagtagcgttagagggcggggttaagtagggtgataggtaggttgtgaggtagttaggggcggggcgacgattagggttgtaggtggaaggggtaaagtcgagtttcgaagtagtagttgagttaggggcggagaatagtggggtgttttggggatgggagattcggcggtattcggaaaaaggattaaggttagtagttatcgggatataattaaatggggatcgggggggtagtcgattatggggcggagtttgtggtttgggaaattaagtggggaaagttcgggagtgatattgttaagtttatagattagtagagtttgggttagggttgttggagttcggtaggggtttcgggattagtatttgaataagcgtttttatttttaggttaaatttgataattttttggttatagattcggacgtggacgttttggggagtcgttatgttggggacgtcggttacgggtagcggtaggatttaagtttaaacgcgttttcgtattattttttttttttttttatttagtttcggggtagcgttttttagagatcggcgaaaatggtaagcgagggtttttgcgtagagttgggattttttttgatacgtgtagggaaattagtttttttttttggtatggttttaataatatggagaggaagggaagagggaatattaagaacgttttatagtggtttttttttattttttttttgttaggtattttaataattatatattttttatatagaaaaaaaaagattggaagaaaagtattaattgagatgtttttggaaagtattagtaataattttttgtttttttaaatttttttatatttttaatattttttatagtgagtataaattgtggagtaaaagaggaaatgataaacgttatatattttttaaagtatggagtttaaggtaggtcggtagagtattttttattattttaatatatgatttaagggatttttgtaaaatacgaaattgattaagttatttatttgtatgtagtttttttatggtttttcgtgttttttttttgtatataattggatttattaaatttattttgttaaggtagttttgatggaaatgttagagtaaatttttaataaatggtggtttttttatttttgttagtaaataatttaagttttttagttggtttttaaggttattagttatttcggttattagttatcgtattttgcgttttttttggattgtttaagttttttttggatgtgtagttttagaatgtggtgttttttttttttagaaagcgttttttttattcgattttattttatttgtatttgttcgggttattttagtaagtatagattgtgaggatttaaaggtttaggatttgaatgtttattttttttttttttttttttttttttttttttttgtggcggagtttcgttttgttgtttaggttggagtgtaatggtataattttggtttattgtaaattttattttttaggtttaagtaatttttttgttttagttttttgagtagttgggattataggtgcgtgttattatgtttagttaatttttgtattttttatagatacggagtttattatattggttaggttggtttcgaattgatttcgtgatttattcgtttcggttttttaaagtgttgggattataggcgtgagttattgtgttcgattatgtttattttttttaatttttataattatttttgaaattgtattatattattattatagattaggagtagggtttagagtagattaaaataaaaaataattaattttgttgtaagattatttattttgaaagtggtaaagtttaggtcgggtacgtttaggtcgggtacggtggtttatgtttgtaattttagtattttgggaggtcgaggcgggtggattacgaggttaagagatcgagattattttggttaatacggtgaaatttcgtttttattaaaaatataaaaattagtcgggcgtggtggcggacgtttgtagttttcgttatttgggaggttgaggtaggagaatggtgtgaatttaggaggtggagtttgtagtgagtcgagatcgttttattgtattattttagtttgggcgatagagtaagattttattttaaaaaaaaaaaaaaaaaagaaaaaagaaataaagaaagtggtatagtttttattgaaagttattttttttttaaaaaattaatatggtttttatttgttgtaagcggggttatgtgtttgtttgtgtttttatagttttttatatattttttcgtaaggtatttattattttattgtatttaatagagaggtagtgtattataggtttggtatttgtttgggtttaaattttgtttattatatatttcgtatgtttgtgtttttgttttttcggaagttaattggtgataattaattgcgtttattttataggttggagaattaaatgagaaaatatatgaaaagtattaagtatagtgtgttaatgtggtatatagtaagattttaatgttcgttagttgttgttattttattattagtttatattttgggagtattttttatgtgttaggaattttgtattaagcgttttatgtgtgtttcgtttaatttttataataattttgtgaggtaaaaacggggtagagaggaataatgatttgtttagagtaaatggagttgttaggttaaaggatatatgtatttaaaaattttgatatattattaaattgttttttatagggattatgttaatttatattttttttagtaatatggtataaatgtttgtttttcgtggttttgttaataggataggttaataaatattggaagttttgttaatttgattaggtagaaatgttttttttagtttatgtttttttgattatgaaggaggttgagaaattttatttatgttttagagttatttgtatttattttattgtttgtttattgttttattgggttgttggttttatttatattcgtttttaggaattttatatattaggaggattagtttttagagatgagttttaaagtttttttatttttatttttttttaaagatatttatagttttaaaaagtttatagaattttgatttagtttatggtttttgttaattttgttttatattgaatttattaattttcgtttatgatttttggattcgtggtttaaattatagggatttaaagggattgtttatatttttttgtagtgtttttatgggtggttttttgtagttttttttttttttttatatttagattattatttattttgaaatatatgttggtttatggtgtgagatatagatttaattttatttttttcggaggttatttagttattttaatattatttaatgaagagtttattttttgtttattggttttggatgttatatttgttatattaaattgtcgtatatgtttgagtttatttttagattttttattttgtttgattggtttatttatgtattaaaattagttttaattattatggttttataacgatttttagtatttgttaggattaaataatttttttttttgttttttgtattattgtttttttagttttattgtttattagtattttttagttattttatttttgtgtaaattttttttttaaatttttttggtatgtttttttaggatgatattttttagtaatattatatttttaatttaatttattattgttagttttatgttattgtttttgtgtaagaatttggtgtattttttaatttattttagtttttttttgtgttttttatagtatttttaaagttttttttattttaggttttgtatatattttttgttaagtttatttttggtaatatttttaggttaaaattttttaaagaaattgaggtttattttttttaggttattttagtgttttggatatttatatagaagttttttgtttaggatagtagagaagttttaaagttagtagttggtagatttgtagacgtgtttttgggatttcgtttatattatgttttttgttgaatatttatatgtaattaatagtttttagttgtattttttatgttgtagttaaagaagaaaatataagttttttttttttttattttttaatatatttttttttaataaggggatttaattttaaattttaagttagaggttattttcgaggaatagatgtgtagtttggtgattattatatttaattattgattttttttaattttgttttgttttttttattatttttatttattgatttttagattagtttttgtttatttgttaggttttggttttttttttggtttttagattttaaggtttttatttttcgttatagagatatttttttaaatattgtttgtgatttgatttgattttaaagagatgaatataaattatttttgtagtgtagtaagtcgattggagttgaattggagttttataattatataaggtaggtttggggttagtttttttatttgagttttgttttttgtaaaatgaatatgattattagttttattgggcgtttgagagtagtagttgagttttttgtaataaaaaagtatttagtagagttttaaggaatgttatttttttttttagggttttttaatattttttttttgttttgaattttttagttgggatattatagtattttttagttatttttttttttttaaattttttattgtattgtggttaaatagtttattagttgaatgatttagttaattggatgttatttataggtttagttttttaaggattatattggtttggtttatttagttttttaatagttttaagattttgatagaggattttgtgagtagtggtttttagagattaagttttgatgtagaattagtttatgggaggttatgttttttttttttgttttttgatggttttaatgttatttatatgaaataaagagggtttttttaagggtttaggatattaagaatttaagtttattaattttttaatatattattggatgtggtatttgtgtttatgaaaatattttagtaataataatgtgtttagagttttttgtatatttgtaatagtttttgtgttgttttgtaattttgtttatatgttggttttgagtttttggagtttttttttatttttttattgtttagtatttagtataggttttggtagagtaagtgtttaataaatatttgttggttgatttttagttatatattttgatggaagtttttatttaggtttttggatttaagtttttatatatacgtttagtttagtttggagatttatttagagtgattaa

SEQ ID NO: 25 - DNA, 11670 bp, Artificial Sequence
  chemically treated genomic DNA (Homo sapiens)
tgttaaagtttatgattttataatataaaatgtatatttttagataattttaaatttatatttgtaagtttttatgattgtagaaatatttttataaaggatttgaatatgaatttttaagatttttttatattggttaggcgcggtggtttatatttgtaattttagtattttgggaggtcgaggtgggttgattatttgagaataggagttttaggttagtttggttaatttggtgaaattttatttttattaaaaatataaaaattagtttgacgtagtggcgtgtttgtagttttagttattcgggaggttgatgtaggagaattgtttgaatttgggaggcggaggttgtagtgagttgagattgtgttattgtattttagtttgggtgatagagtgagattttgttttaaaaaaaaaaaaaaaaaaaaataatttttttatattattggttttgatgagttatttaagttagtgttagttttttttaatttttgttggatgaaatgtatatttttttttttttagtaaatacgattatgtttatatttgaacgtttagttttattttattgtaaattataatttagttatttttttgaatgagttgaatttttaaagttttgtgtaataaaattttttgataattaagtttagttttttttttgaatggttataatttaattgtatatggaagtattttttttttatttttttgaaatggagttttatttttgttgtttaggttgaagtgtaatggtatataataagtaattgtaaaaatattttaaattttgtttaaaaagtttggaaatatagggaatatagtgggtttttttgtttgtttgttttttgagatagagtttcgttttgttatttaggttggagtttagttgcgcgatttcggtttattgaaacgtttattttttaggtttaatcgatttttttgttttagttttttaagtagttgggattatagatgtgtgttattatatttagttaaattttgtatttttagtagaggtggggttttattatgttggttagtttggtttttaattttagattttaggtgattcgtttattttagttttttaaagtgttgggattataggcgtgatattacgtttggtttatagtgtatatttaatatcgtattttggattaataattttatttatttttttagagatatttatttaagatagtatgtggaagttaaaggaaaatatattgagtaatattatttcgaaatgttattaatatattgtttgaaaataaattagttttatgtttttgattttttgaatatttatgaagtgttgtttagcgttttgggaggttaaggcgggaggattgtttgaggttaggagtttaagattagtttgattaatatggtgaaattttgtcgttattatataaaaattagttaggcgtggtggtgtatgtttgtaattttagttatttgagaggttgaggtaggagaattattttaattcgggaggtagagattgtagtgagtcgagatcgtattattgtattttagttagggcgatagagtgagattttattttaaaaaaaaaaaaaaaaaaaaaaattgaataaggtcgggcgtggtggtttatatttgtatttttagtattttgggaggttaaggtgggtaggagtttatttgaggttaggagtttaggataatttcgggtaatatggtaaaaatttgtttttttaaaagtatataatttagatatggtggtatatgtttataattttagttattttagaggttgaggtacgagaattatttaaattaaaaagtggaggttgtagtgagttgagattatgttattgtattttagtttggtaataaagtgagattttgttttaaaagaaaaaaaaaaaaggaataatttaaaagtttaataaaggattgtttaatatatatattatttataatgaaaataatagtattggaatgtatttattgatttgaaaaagagtttataatatattttaattatttatttttataatatagatttttatatttttttatagattgtagagggtgaagttttagaatttgtatttttatttatttatttatttttgagatatagttttattttgttgtttaagttagagtgtatggtgtgattttggtttattgtaatttttattttttgagtttacgtgatttttttattttagtatttttaagtagttgggattataggtgtttattattatatttagttgatatttgtaattttagtagagacgtggtttttttacgttggttaggttggtttcgaatttttgatttcgggtgatttatttattttagttttttaaagtgttgggattataggtgtgagttattgtatttagtttatattttaaatgaaaagaagaaaatggagattataaattattaagtatattatttgatttttataaagatttatatgtgtaatttatatataaaatatatatgtgtgtgaatatatatatatatataatttgaaaggttatatataaatatgttaataataattatttttttggtttatttgtagtttgtaatgttttaataataagtatggataattaataagatagggataaaaagataagtaataggatggtttattcgaaattaaagtaaatattgattaagtttattaaataataaagttattaaaatgaagaaggaattgaagattttaaaaaaaagaaattatataattatatatgatttttagtgattttttgttatttgtggggaattttgtatattgtagaattgaagaagtaaagtatgaaattataaaaatttttgtaaattaagatgaaattttttggtttaagtagttgtttagttaaagttttgttgattagttttgttttttttattagttatttagtgaaattgttagattaggataaaaagaatatttaatatttaaatgtgattataatatgataattaaggttttaatatatatatatgaatttattttataaaaattttataaggtaggtattattttttttttattttattaaagagacggattttaatttattaatggtgggtaaatgttgttaaagtaatgtgaaatttaggtagaatgttgtatttttagttaatgatttaaaattttgagtttttttgttttttttaggtttgatcgtattttaatggaattatttaaatatttgatgttgagtttttttatggatttattagatgaaattttggaaagggatttttttttttttttaagatagggtttcgttgttatttaggttggagtggagtggcgcgattttggtttattataatcgtcgtttgttaggttttagagagttttttattttagttttttaagtggttgggattataggtgtatgttattaagtttatttaattttttttttttttttttttttttttttttttttttttgtttttttttttttttttttttttttgtttttttttttttttttttttttaagagatggggtttcgttatgttgttttgaggtttggcgatttatcgattcggttttttaaagtgttgggattatagttatgagttagtacgtttaattgagagagattatgatgttttttaaataaattttatttggttgaaattttatagttgagtatggtttaatttgagtagtttattttgagtattttaattatggtttatagatttgggtttttttgagaattgtttgtaaatggtttatagagagagagtagaaaattttatgttaattttgtaggtaattttatggttgttaattttaacgataaaaagttttgatttggattttgtatgtttttttatttttttgttttattaatttgttaaaaattaattgaaaattgaaaaaaataaatcgatcgtttttttagtgaagagaagtattgttgtaaagttttttatatttaaatattattaaattttaaggtcgtttttgaggtttaattttttaaaatgatgtttcggatattttttttcgttttatttttttttttttttttttttttttttttttttttttttttttttttatttgagacggagtttttgttttgttgtttaagttggagtgtaatggtacgatttcggtttattgtaaattttaatttcgttttcgtttcgttttcgttttttgagtagttgggattatagacgcgcgttattacgtttagttaatttttgtttgtttagtagagacgaggtgttattatgttggttaggttggtttcgagtttttgatttcggtaatttattcgtttcgtttttttaaagtgttgggattataagcgtaaattatcgcgttcgattttttttttttattttatttattttataatttatattattgatcgttgataattgtatttattgtaatgatattgataattgtatttgttgtaataatattgatattgataattgtatttattgtattataatattattattgatatcgataattttatttattgtaatgattaataaaggtaggtagaaagaaaataaaagtaattgaaattattaggtagcgtttttgcgaatagtaaagagggaagaaacgttttgagcgtagtaacgttattaataaggagtcgacgcgacgggttcgtttataggtaaggaaggtcgatttcgcgagtgtaggcgcgagcgttagttcgtgacgtttgagggggttggggggatgttgtgtgggttttaagaagacgttacgttttcgtcgtcgttacgttttcgtcgtttttatcgtcggttgtcgcgttcggaggaggtcgggatgttattattttcgtcggggttttttattgtgttcgggttagttgttgtcgtcgacgtcgtatcgttgcggtcgggggattgggtcggggtttttatcgtcgatcgaggggagcgggttcgttcggttttgttttttgcgatttggtcgttagttttacgtcgtcggtttggaggggcgaagaggacgagggggttaaggtttttttcggggtgagtgcggtttgggagaattcggtacggtggtttcggagttggattgggaatcggtttaggggcgaaagtttgtcggcgcgtgtttacgacgttcggggagaggaaatttagagagttatttttggtagggggagttatagaatttgttcgggaggtgttttttggattttcgttttgtttaggtttaatttttggtttgggttttgtttgtatttggtagtttggttttttatttcgtcgttttttcgtttttggtagttgtgttcgggatggaattttgtttttttttcgtttttttatttttttattttggtgtgggtgaagtggttgggttacgatggtttagtatttatgattagcgttcgttttggtatagaataaagaaatttggatttttggtatgtttcgtaatcgcggggaatagatacggaagtagtataagtaattagggttttaatagattttttttagtacgttaaattaaatatagagtgtgtacgttaaaagtcgagttttcgcgtgaatttagatataattttttttgtttaaatatttggtaaaatggtttggatttttggatgtattttatgtcgttggagagttatttgtttgtgttttgtgagttttttgacgaaatagttttttcggtgttgtattaagatagttacggtgttttttatttatttaattgaataaattatgtgattgtattttagtgttgttttttttatttttatttttttttgattaggatttttattttatttaatatttgatttcgtatttttaattaaatgtagtttttttaatattttataggaatttttgtaattgtagaaataaattttgtaatttgtaaatggatgtttttttaaagttataattgattttatttaattaagttatttttgtagattagttttttgattattttgtatatatttttagttttttttggtttatattttttttaaattttatttttagtttttatattttttagtgtagtttaatattgttgggtttagatcggaagtatgatagatttatttttgtaaacggaatttgaattagattattataagttagtgttattatggtttttaggtattataagttttttgaagttaagtgcggttaaattaggtattataggttttttttgtataaaattgttagtgtattggagacggtgtgttgtattagaaatagtttcggattagatatggggattaggatgtagtgttattgttttatatataagataaaatgatgataatataagtgttatgtattttaaagttgttggttggaatatgagatgatggatgtaaaagtggttagtaaatgtgaaaagtattttggaaaagttttgtttattttatttggagtaatgttggtagaaggaataatagggaggaaggtgttagagaaagtatatgtaattagatttagtaagttatcgggttgatagattgaaagatgttttgttattttgggtggttaaggtgggcggattatttgaggttaggagtaaaaaatgataaagtaatgagatgagataaatttggttaacgttatgaaattttatttttattaaaaatataaaaattagttaggtatggtcgttcgtgtttgtaattttagttattcgggagattgaggtataagaattatttgaatttgggaggtggaggttgtagcgagtcgagattgtagtattgtattttagtttgggcgatagagtgagatttcgttttaaaaaaaaaaaaaaaaaggatgaaaagatgttatgttatattttatgaagtaagtttatattttataaagtagaatattagtataatgtggtgatagtaatattttacgattatagttttatattgtaattaatatttttaattataataaattgagatattagttagtagattatttttttaaagattttagtatttttaagtgtgtttcgtatagtgataataaatgtaatttttgtaggtggtatagttattttttgatttatttttataatttcgagagaatttagtattattttagttttttttttaaattttgtgttatatttattttattttatttagtttttttgagatgtagtttcgttttgttatttaggttggaatgtaatggcgtaatttcggtttattgtaatttttgttttttaggtttaagcgatttttttgttttagtttttttgatcgtttggattataggttagtgttattatttttggttaatttttgtatttttggtagagatggggttttatatgttggttaggttggttttgaatttttgacgttaggtgattcgttcgttttagttttttaaagtgttgggattataggtgtgagttattatgttcggtttgtgttaatatttttgatagagtagtttattttattgtttgaaaattatttttatgggagtaatgataagtatatgtttaggatttttttaagtatgtttggtgattttttaaatatataggttgttggttaaaaagtgaatataaatgtttagaatgaaatttttttgtttaaatggggaagtgaaaggtttgttcgggcgtttttatttgtttattgtaattgattttcgtataaacggttattattggtatttattgtagtattagtattaaattgtatatagtaaaattattgtgtaaaattgtgttataatttaaatagttttaatgcgattttaaaaaaaattgtagagatagattttattgtgttgtttaagttaggtttgaatttttgggtttaaattatttttttattttgttttttaaaggtgttaggattataggagtgagttattgagtttggtttaaatgtgattttaatatttaatttttgtttatgttgttaaattgtttggggaaagttgttttattttggttggatttattagtattttttttttttgaagttatgttagaaggaattaattatttttttgatttttaatttaaggttaataattgttttgaatttatttttatgattgtaataagtaagtggtataaggatgtgttattattattaagagttaatttattgagaaattaagttatttttgtgttaataggttattttaataaatattattttaaagtgttattttttattttaatttttaaaaaaaaatatatgaataagaaatgggaagtaataatagttaatttgtgagttagtagtattttgatttttttcgaagaggttgtggttatattaattttttttttgtttgttttttgtttttaatagttgtttgatgataaagtgtttttaagaaatagtatttttttaattgtttaaattgttttgatttatttagtgtattttttttttaaaatttatgatgaaatggtagagtaaatttatttatatttttttttttaagttttgtttaattagataattgattatttttaaattaaatatttatgtttatgtgttgaggtattaatatatgatttaatatgatattaaggtaaaaatggaataaataggttgagatagttgaaagatttgggttgtttgtgtttcgaggagttatttagtttttgttgttgtttgttttgttttgttttttgagatagagtttttttttgttatttaggttgtagtgtagtggtgtaattttagtttattgtaatttttatttttggggttttagcgatttttttgttttagtttttatagtagttgggattataggtaggcgttattacgtttggttgattttttgtattttttgtggaaacggggtattattattttggttaggttggttttaaatttttgattttaggtgattcgtttattttagttttttaaagtgttgggattataggtgtgagttattacgttcggttttaaggagttgtttttatagagataaatttgttttattggttaagtagttgaaaggaatggattgttttttagaattttttaagataaatttttttttttattagtgaggaataattttataaatagaaattaatattgttggtgtgtagttttttatagaatatttttgttatatttttatggggtaatatatgataaattttatttatgtagtttaataagtaaaataagtttaagagattgagtaaaggtttgttgattagtgtttatattttataggtaagtattatttatttaatttttataggtttgttatgtgttaggtattatggtaggtgttgggaatatattgggtataatttttagtttttgtttttatttttgaaatgttaaatatttttttgagtatttgagatatttgaaaaagatatttagataatattttggtgtgttttttaatatataataaaaaggtacgataagataatagaaagtttttttgattattgaatttaggaaaatatattattcgttttagagtgagtattaaagatttaagaaaagttaaatattgggaaatatagtaaattaaatatttagaaaagatttattagtttttagtttttagttatagtatgttttggttttatttgagtattgtaattttagagtagtaagtatttttattatttgggtttgttgattgtaattgtgggtttttttttattatttttgttttaaatagaggggattgtttggtaaggtaggtgtttttttttttgtttattttttttttttaatagagaaagtgttaaataagtaaagattattttaaatgttttttattaatttataaaaattgtttagattattgtttttttagagaattaaaaattttatttttatatgtaaatgatttttttaagtaaataagttggtgtggaaaagttagtatttattattttttttttgtggtaataagtgtattattaaatattgaaattttttgggaatgtttaaaatttttttttgagggtaagtaaaaatttaaattgggaagagagttttttagttttggtagagatataaatttagtttattttgtgaaatttaatattttaggatatttttattgtaattttgttattacggaatataaggtttttttttttgtaattttgtgtattttttgaatgttgacgtagtagataagatagttataggatatgattatattttttttttagaagattggttgatgtgaatggttgatataattgattttatttaataaatattttttaaagttatagatagtattgttttaaaaattaaatggtatagacggatttattatgaaaagtattagttattttttgtattttatttttttttttttgttattggttttgttttgttatttagattggagtgtaatggtgtgatttcggttcgttgtaatttttattttttaggtttaagcgatttttttgttttagttttttaagtagttgggattataggcgtttgttattatattcggttaatgtttttgtatttttagtagagattgggttttatcgtgttggttaggttggttttgaatttttgattttaagtgattcgtttatttcggttttttaaagtgttaggattataggcgtgagttatcgcgttcggtttagtgttaacgatttttaattttatttttagtattgttagtgatgtttcgtattttttaaatatgttattgtaaaaagaaaagaaaagaatagaaatatgttattgttgtttgttgaataattttagatatttattgatttgaatgtaaatgaattaaatattcgtgtatatttttttttttttatagtttttattgttttgttgtattgttaattagttgatttttattttattttaatttttattttttattttattattagagggagtatttttagattttttatttttaaaatgaggatattggttttacgtgattttttggaaaaattaaaattaaagtttatggtatatgttaaaatacgtagttgtataaaagggtatttattaagtttagtgtttgaaaatatatgtcgagttatatgagaagggtatagtatagatatgaaataaattaaaagattgtataatttatttacgggataagttattgaatagatttttttaagtggtttaggaattgtggtattaaattattgagaaggaaatatgaaagatagtatattatttgattttgttgaattatgagtttaaatattattgatttattattatttacggtttagaattaatttttatttaagggatagaaaatttaattatgagtttgtaataaagaatatttttattttttattttattttaaattttttaatataatttatagtatgaaatatatttttaattataatttgagatattatatatgtaattgaaaataagtatttttattgaatagtatttttattataaatagtatttaatttttttagaatatatgtagtttgagtatttttttttttttaaaaaaaaaaaaaaattgtaattttgtaaatgaattttatgattagattattgtattaaatattaagtatgaattaatatataagattattacgtttttttagtggataaaaagtaaagtggaaattaagttatatatttttttttttttatagg

SEQ ID NO: 26 - DNA, 11670 bp, Artificial Sequence
  chemically treated genomic DNA (Homo sapiens)
tttatgaagagagaaaaatgtataatttaatttttattttattttttatttattgaaaaggcgtaataattttatatattagtttatatttgatgtttagtataatggtttggttatgaaatttatttatagggttgtaatttttttttttttttaaagaaaagagaatatttagattatatatattttgggaaagttaaatattgtttatagtaaggatattgtttagtgaaaatatttgtttttagttgtatgtatagtattttaggttatgattgaaaatatattttatattatggattatattaaaaaatttgaagtggggtaagaaataaaaatgttttttattatagatttataattaaattttttgttttttggatagaggttgattttagatcgtaaataatagtaaattaataatatttaaatttatgatttagtagagttaggtggtgtgttgttttttatattttttttttaatagtttgatgttataatttttgagttatttaaagaagtttatttaataatttgtttcgtaaatgaattatgtaattttttgatttgttttatatttatattatgttttttttatatagttcggtatatgtttttaaatattgaatttggtgaatgtttttttatgtaattacgtattttaatatatgttatgaattttagttttagtttttttaaggaattacgtgaggttaatatttttattttaaaagtaagaaatttagagatattttttttggtgatggagtaagaaatagaagttgaggtaaggtaaagattaattggttaataatgtaataaaatagtgaaaattatagaaggaaagaggtatatacgagtatttagtttatttatatttaagttaatagatgtttaaagttatttaataaatagtagtaatatatttttgttttttttttttttttttgtagtaatatatttaagagatacggagtattattagtagtattaaaaataaagttaaaagtcgttgatattaggtcgggcgcggtggtttacgtttgtaattttagtattttgggaggtcgaggtgggcggattatttgaggttaggagtttaaaattagtttggttaatacggtgaaatttagtttttattaaaaatataaaaatattagtcggatgtggtggtaggcgtttgtaattttagttatttgggaggttgaggtaggagaatcgtttgaatttgggaggtggaggttgtagcgagtcgaggttatattattgtattttagtttgggtgatagagtaaaattagtagtagaggaaagagggtgaaatgtagaaaatgattaatgttttttatagtaagttcgtttatattatttgatttttaaaataatattatttgtgattttaaaagatatttattaaataaaattaattatgttagttatttatattaattagttttttaaaagaaaaatgtggttatgttttatagttattttatttgttacgttaatatttaaaagatgtataaagttataaagaaaaaagttttatgtttcgtaatgataaaattataatggaaatattttgaagtgttagattttataaggtaaattaaatttgtatttttgttaaggttggaagattttttttttagtttgaatttttatttatttttaagagaaggttttaaatatttttaaaaggttttaatgtttgatgatatatttgttattatagaaaaaaaatggtagatgttgatttttttatattaatttatttgtttgaaaaagttatttatatataggagtaaggtttttaattttttgggaaaataatgatttaggtagtttttataagttaatgaaaaatatttaaaataatttttatttatttagtattttttttgttgggagggaaaaataaataaaaagagggatatttattttattaaataattttttttgtttagaatagaaatagtagaaaggagtttataattataattaataagtttaaatggtgaaaatatttattattttagaattataatgtttaagtgagattaaagtatgttatgattaaaggttgaaaattggtaagttttttttagatgtttaatttattgtattttttaatgtttaattttttttaagtttttggtatttattttaaagcgaatgatgtatttttttaaatttaataattagaaaagttttttattattttgtcgtatttttttattgtgtgttgaaaaatatattaggatgttgtttgggtgttttttttaaatattttaaatatttagaaaaatatttagtattttaaaaataaaagtagaaattgaaagttgtatttaatatatttttaatatttattatggtgtttagtatataataggtttataaaaattaagtaaataatatttatttgtagggtatggatattggttagtaaatttttgtttaattttttaggtttattttgtttattaaattatatgaataggatttgttatgtgttattttataaaaatgtaataaaaatattttgtgggaaattatatattagtaatattaatttttatttgtaaaattgttttttattggtaagaggaaaggtttattttgggaaattttagaagataatttattttttttagttgtttaattaatggaataagtttgtttttgtgaaaatagttttttgaggtcggacgtggtggtttatatttgtaattttagtattttgggaggttgaggtgggcggattatttgaggttaggagtttgagattagtttgattaagatggtgatatttcgtttttataaaaaatataaaaaattagttaggcgtggtggcgtttgtttgtaattttagttattatggaggttaaggtaggagaatcgttggaattttagaggtgaaggttgtagtgagttgagattgtattattgtattatagtttgggtgataaagggagattttgttttaaaaaataaaataaaataaataataataaaaattaaatagtttttcgaaatataggtagtttaagttttttagttattttagtttatttattttatttttattttaatattatattgaattatgtgttaatattttagtatatagatatggatatttagtttgaggataattaattatttagttaaatagaatttggggagagagatatagatagatttattttattattttattatgaattttaggggaaaagtatattaggtagattaaaataatttaaataattgagggagtattgttttttggaagtattttattattaaatagttgttaagaataggaaataaataagaaaggagttaatataattataattttttcgaagaaaattaggatattgttgatttataagttaattgttgttgttttttattttttgtttatgtatttttttttggaaattagaatgggaaataatattttaagatgatatttgttaaaataatttgttggtataggaataatttgattttttaatagattgatttttggtagtggtggtatatttttatgttatttatttgttgtagttataaagataaatttaaaatagttgttgattttaggttaaaaattaaagagataattgattttttttgatatagttttaagggggaggagtattggtaaatttaattaggatgaagtagttttttttaggtagtttagtaatataagtaaaaattaaatgttaagattatatttaggttaggtttagtggtttatttttgtaattttaatatttttggaggataaggtgggaagatggtttaagtttagaagtttaagtttagtttgggtaatatagtgagatttgtttttataattttttttaagatcgtattagaattgtttagattataatataattttatatagtgattttattatatgtagtttaatattggtgttgtaataggtgttagtaatgatcgtttatgcggaaattaattatagtaggtagatggaaacgttcgggtaagttttttatttttttatttaaataaaaaggttttattttaaatatttatgtttattttttaattaatagtttgtatgtttaggagattattaaatatgtttgaaaaaattttagatatgtgtttgttattgtttttatgagggtagtttttaaataatgaaatgaattgttttattagaaatgttaatataagtcgggtatggtggtttatatttgtaattttaatattttgggaggttgaggcggacggattatttgacgttaggagtttaagattagtttggttaatatgtgaaattttatttttattaaaaatataaaaattagttaggagtggtggtattggtttgtaatttaagcgattagggaggttgaggtaggagaatcgtttgaatttgggaggtagaggttgtagtgagtcgagattgcgttattgtattttagtttgggtgatagagcgagattgtattttaaaaaagttaaataaaataaaataaatgtaatataaaatttagaggaaaaattagaatggtgttgagttttttcgaaattgtgaaaataaattaaaagatgattgtgttatttataaaagttatatttattgttattatgcggaatatatttgaaaatgttgagatttttaaaaagataatttattaattgatgttttagtttgttgtagttagaaatattagttgtaatataaaattataatcgtggaatattattattattatattatattagtattttgttttataggatgtaaatttattttataggatgtaatatgatatttttttattttttttttttttttttttgagacggagttttattttgtcgtttaggttggagtgtagtgttgtaatttcggttcgttataatttttattttttaggtttaagtgatttttgtgttttagtttttcgagtagttgggattgtaggtacgagcgattatgtttggttaatttttgtatttttagtagagatggggttttataacgttggttaggtttgttttattttattgttttattattttttgtttttgattttaggtgattcgtttattttggttatttaaagtaataagatattttttaatttattagttcggtaatttattagatttggttatatatattttttttgatatttttttttttattgttttttttattagtattattttagatagaatgaatagaatttttttagagtgttttttatatttattaattatttttatatttattattttatgttttaattagtaattttgggatgtatgatatttgtgttattattattttattttatatatgaggtaatgatattatattttggtttttatatttagttcggaattgtttttaatatagtatatcgtttttagtgtattggtaattttatatagaagaagtttgtaatgtttgatttggtcgtatttagttttaaagggtttgtaatgtttgaagattataatagtattgatttatgataatttagtttaagtttcgtttgtagaagtggatttgttatattttcggtttaagtttagtagtattaggttgtattagagaatatgaagattaggaatagagtttagagaaaatgtaaattaaaaagaattaagaatatgtgtaaaatgattaagaaattagtttgtaggggtaatttaattgggtaaggttagttgtaattttgaggaaatatttatttataaattatagaatttgtttttataattgtagagatttttataaaatgttagaaaaattatatttaattgaaaatacgaaattaggtattaggtgaaatagagattttaattaagagaaggtgagaatgaaaaaagtaatattaaaatgtaattatatagtttatttaattaaataaataggaggtatcgtaattattttgatgtaatatcggaaaagttgtttcgttaaagagtttataagatatagataagtaattttttagcggtatgaaatgtatttagaaatttaaattattttgttaggtatttaaatagaaagggttgtgtttagatttacgcggggattcggtttttgacgtatatattttgtatttggtttagcgtattagggaagatttattaaagttttgattatttatgttgttttcgtgtttatttttcgcggttacgaggtatattagaagtttaagtttttttgttttgtattaggacggacgttggttataaatattgaattatcgtagtttagttattttatttatattagggtaaaagggtgggggagcggaggaggggtaaggttttatttcgagtataattattagaaacggaaaagcgacggggtggggggttaaattgttaaatataaataggatttaagttaagggttggatttaagtagggcggggatttaggaagtatttttcgagtaggttttatggttttttttattaagggtaattttttgggtttttttttttcggacgtcgtgggtacgcgtcgatagattttcgtttttaggtcggtttttagtttagtttcggagttatcgtgtcgagtttttttaggtcgtatttatttcggaggaagttttggttttttcgtttttttcgtttttttaggtcggcgacgtggggttgacggttaggtcgtaaaaagtagggtcgagcggattcgtttttttcggtcggcggtggagatttcggtttaatttttcggtcgtagcggtacggcgtcggcggtagtagttgattcggatatagtgagaagtttcggcggaagtgataatatttcgatttttttcgggcgcggtagtcggcggtggaggcggcgggggcgtggcggcggcggaggcgtggcgtttttttgaaatttatatagtatttttttaatttttttagacgttacgggttagcgttcgcgtttgtattcgcggggtcggttttttttgtttgtgggcggattcgtcgcgtcgattttttattggtggcgttattacgtttaaggcgttttttttttttttgttgttcgtagggacgttgtttggtagttttagttatttttgttttttttttgtttgtttttattgattattatagtaggtgaaattatcgatattaataataatattgtaatataataggtgtaattattaatattaatattattataataggtgtaattattagtattattataataggtgtaattattagcgattaataatgtgaattataaaatggatgaaataaggggaggaggtcgggcgcggtggtttacgtttgtaattttagtattttgggagggcgaggcgggtggattatcggagttaagagttcgagattagtttggttaatatggtgatatttcgtttttattaaataaataaaaattagttgggcgtggtggcgcgcgtttgtaattttaattatttaggaggcgagggcggagcggaggcggagttggagtttgtagtgagtcgagatcgtgttattgtattttagtttgggtaatagagtaaaaatttcgttttaaataaaaggaaaaaggaaaaaaaaaaaaaaagaaaaagaaaaaaaagaaataaggcgaggaaaaatattcgaggtattattttggggagttaggttttagaagcgattttagagtttggtaatatttgagtgtgaaaagttttatagtagtgtttttttttattgggggaacggtcggtttattttttttaatttttaattagtttttgataagttaataaaatagaaaaatgaaaagatatataaagtttaagttaaaattttttatcgttagagttaatagttataaaattatttgtaaaattgatatagagttttttattttttttttgtgaattatttgtaaatagtttttagaagagtttaggtttatagattatggttagagtatttaaggtaaattatttaaattagattatatttagttgtagagttttaattaaatgagatttgtttggagaatattatagttttttttagttgggcgtgttggtttatgattgtaattttagtattttgagaggtcgagtcggtagatcgttagattttagggtaatatggcgagattttattttttaaaaaaaaaaaaaaaaaaagagatagagaaagaaagaaagaaaaagaagtaaagagaaagaaaggaagaaagaaagaaaagaagaaaattaggtgggtttggtggtatgtatttgtggttttagttatttgggaggttgaggtgggagattttttggagtttggtaggcggcggttgtagtgagttaagatcgcgttattttattttagtttgggtgatagcgaaattttgttttaaaaaaaaaaaaaagtttttttttaaagttttatttgataaatttatagaaaggtttagtattaagtatttgggtgattttattggggtacgattaggtttgaggggaatagaaaagtttaaaattttaaattattgattaaaaatgtagtattttgtttggattttatattgttttggtaatatttatttattattggtagattaaagttcgtttttttgataaaatgggaagaaaatagtatttattttatagggtttttgtgagatgaatttatatatatgtattaggattttggttgttatattgtaattatatttaagtattaggtattttttttattttagtttagtaattttattaaatagttagtagagaaaataaaattgattaatagagttttagttaaataattatttgggttaagaaattttattttgatttatagaagtttttgtagttttatattttgtttttttagttttgtaatgtgtagaattttttataggtggtagaaaattattggaaattatatatagttatgtgattttttttttttaagatttttagttttttttttattttagtaattttattatttaataagtttgattagtgtttgttttggtttcgagtaagttattttattatttatttttttatttttattttgttaattatttatatttattgttgaaatattataaattataagtaagttaaaaagataattattattaatatatttatgtatagttttttagattatatatatatatatatttatatatatatatattttatgtataaattgtatatataagtttttataaaaattagataatgtatttagtggtttataatttttatttttttttttttatttaaaatatgagttgggtgtagtggtttatatttgtaattttagtattttgggaggttgaggtgggtggattattcgaggttaggagttcgagattagtttggttaacgtggagaaattacgtttttattaaaattataaatattagttgggtatggtggtgggtatttgtaattttagttgtttgggggtgttgaggtaggagaattacgtgaatttaggaggtggaggttgtagtgagttaaaattatattatgtattttagtttgggtaatagagtgagattgtgttttaaaaataaataaataaataaaaatatagattttgaggttttattttttatagtttatggaaagatatgggaatttatattataaaaataaataattaaaatatattatgaatttttttttaagttaataaatatattttaatgttattatttttattatggataatgtatatattaaataattttttattgaatttttagattgtttttttttttttttttttttgagatagggttttattttgttgttaggttggagtgtagtggtatggttttagtttattgtagtttttattttttgatttaagtgattttcgtgttttagtttttggagtagttgggattataggtatgtgttattatgtttaagttgtgtatttttggagagataggtttttgttatgttgttcggggttgttttgaatttttggttttaagtgaatttttgtttattttggttttttaaaatgttgggaatataggtgtgagttattacgttcggttttgtttaatttttttttttttttttttttttgagatggagttttattttgtcgttttggttggagtgtagtggtgcgatttcggtttattgtaatttttgtttttcgggttgaagtgatttttttgttttagttttttaagtagttgggattataggtatgtattattacgtttggttaatttttgtgtagtagcgatagggttttattatgttggttaagttagttttgaatttttgattttaggtaattttttcgttttggttttttaaagcgttggataatattttataggtgtttaaaaagttagaaatataggattaatttatttttaaataatgtattagtaatatttcgaaataatattgtttaatatatttttttttgatttttatatattgttttaggtaagtgtttttaaagaaataaatggaattgttaatttaaaatacgatgttaaatatatattgtaggttaggcgtggtgttacgtttgtaattttagtattttgggaggttgaggtggacggattatttgaggtttggagttggagattaggttggttaatatggtgaaattttatttttattaaaaatataaaatttagttgggtgtggtggtatatatttgtaattttagttatttggaaggttgaagtagggaaatcggttgaatttgggaggtggacgttttagtgagtcgaggtcgcgtaattgaattttagtttggatgatagagcgagattttgttttaaaaaataaataaataaaaaaatttattgtattttttgtgtttttagattttttggataagatttagggtatttttataattatttattgtgtgttattgtattttagtttgggtaataagagtggaattttattttaaaaaaataaaaaagaaatatttttatatataattagattatagttatttaagggaaaaattaggtttagttgttagaggattttattgtatagaattttagagatttaatttatttaaagaaatagttaggttataatttgtagtgaagtgagattgagcgtttagatatggatatagtcgtgtttgttgaggaggagggggtgtgtattttatttaatagaagttgagaaaggttgatattagtttaaatgatttattaaaattaatagtgtgaagaaattgtttttttttttttttttttttgagatagggttttattttgttatttaggttggagtgtaatggtataattttagtttattgtaattttcgttttttaggtttaagtaatttttttgtattagtttttcgagtagttgggattataggtacgttattgcgttaggttaatttttgtatttttagtggagatggggttttattaagttggttaggttggtttggaatttttgtttttaggtaattagtttatttcggttttttaaagtgttgggattataggtgtgagttatcgcgtttggttagtgtgaagaaattttaagagtttatatttaagttttttgtgaggatatttttgtagttataaaaatttataaatatgagtttaaaattatttgaggatatatattttatattataaaattataaattttggta

SEQ ID NO: 27 - DNA, 8201 bp, Artificial Sequence
  chemically treated genomic DNA (Homo sapiens)
gataaaatattatgagaggttgggtatggtggtttatatttataattttagtattttgggaggttaaggtggttagattacgaggttaggagtttgagattagtttggtgaatatagtgaaattttatttttagtaaaaatataaaaaattagttaggtgtggtggtgtttgtaattttagttatttgggaggttgaggtaggagaattatatgaattcgggaggcggagatggtattattgtattttagtggggtgatagtgcgagattttgttaaaaaataaaaaataaaaaaaaaaaacgatgtttttttatatagtgagttttagttaaatttaaatatatttaattttttatttagagtatagaaaataaaattggtagtttatatgttaaaaggtggatgtttttttaattttgggtttttaatttttaaaaatattaaggtaataaattaggagaatttttggtaaagaatttgataaacgtaatatatcgtgtgtattttgtaattagtttattttttattaaatagatttataaaataaattagttatattgagtttgtttttgggataagtaattgaatatgtgattgtaaaggtagagattttttttggttttttttggtttttttgtttaaagtttatgagttttgtaatattttgttttttattttgttaattttttttttattatttttattatttgttatatttgaatagtttgaatattttagttatatattatatattaggtgtattagtttgtttttatgttgttaataaagatatatttaagattgggtatttataaagaaaaaaagaggtttaatgggtttatagttttatatggttggggaagttttataattatggtggaaggtaaaagaggagtaaggatatattttttatggaagtagataaaaaggtatgtgtaggggaatttttttttatgaagttattagattttatgagatttttttattattatgagaataatatgggaaaaatttatttttatgatttaattattttttattaggtgttttttatgatattaggggattattataatttaaggtgaggttttggtggggatatagagttaaattttgttattttgtttttggttttttttaaatgttatgtgtttatattttaaaattaattttgttttttaattgttttttaaagtttttatttattttagtattaatttaaaagtttaagtttaaagttttttttaagataaggtaagttttttttatttatgagtttgtaaaattaaaagtaagttagttattttttagatataacggggatataggtattgggtaaatatatttattttaaatgggagaaattggttaaaggaaggggttatattttttatgcgagtttaatatttagtagggtagttaaattttaaagttttaaaatgatttttgattttatgttttatatttcggttatgttgatgtaagagtcggggttttatggttttgggtagttttattttcgtggttttgtagtgtatagtattttttttagttgtttttatgggttggtattgagtgtttgagtattttaggtgtatggtgtaagtcgtttgtggatttattattttaggatttggaggatggtggttttttttttatggttttattaggtagtgttttagtgaggattttgtgtgggagtttatattttatattttttttttgtattgttttagtagaagttttttatgagggttttatttttgtagtaaatttttgtttggatatataagtatttttatatattttttgaaatttagatagaggtttttaaattttaatttttgatttttgtgtttttataggttttatattatatggaagttgttaaggtttggggtttgtattttttgaagttatagtttaagttattttttggttttttttagttatggttttagtggtttaggaagaagggtattaagtttttaggttgtatatagtagaagggttttcggtttattttatgaaaatattttttttttttttaggtttttagttttgtgataggaggggttgtttggaaggtttttgatatattttggagatatattttttattgttttggagattaatgttttagagattaatatttggtttttcgttatttttgtaaatttttatagttggtttgaatttttttttagaaagtgggttttgtttttttagtatattatttggttgcgaatgttttaaatttttatgttttgttttttttttaaatataagttttaattttaaattatatttttgtaaatatataaaaatgaatgtttttaatagtatttaaattatttttggaatgttttgttgtttagaaattttttttgttagatgttttaaattattttttttaagtttaaagttttatagatttttagggtaggggtaagatgttattattttttttattaaaacgtagtaatagttatttttattttattttttaataagtttttatttttattcgagatgagtagtatttagttaaagttatttaataagtttttagaaagttttagattttatttttttatttttttttaagtttttagaattgttttaatttttgtattttatttagttttaatatcgtttttatatttttggagatttttatagtagtattttattatttagtataaatttattgtattagttattttttatattgttaataaagatatatttaaggttgggtaattatatagaataaaaaagatatttaatagatttatagttttatatggttggggaggttttagaattatagtaaaaggtaaaagaggagtaaggatacgttttatatgggtgtaggtaagagggtatgagtagaggaatttttttttataaaattatcggattttatgagatatttattattaagagaatagtatggaaaaaaaatagtatttatgatttaattatattttattagatattttttataatatatgaggattattataatttaaggtgagatttgagtagggaaatagagatagattatattattagtttttatgtttgttttttttttttgaatgtgagattaaaggggaaaggattatgatatgttttgattgaatttttggtatttagagtaatgtcgttcgtatatgtttgttaaatgaatgattagatgtattgtttgaggattttaataaaagataaatttagttaaataatttgtaaataattatttttgattatttttttaattttaaatatttgtattaattataataatattatttattatttgtttattatttgttaggttatgttttatgtattttttatatttttttttatttaatgtttaaaattgtgtaggtatatattattaataaaattattttatatatagaggaattaatgtatagggaagtttattattttgttaaggaagggaagtttaaaatgttaagttcgatatttttattttagagtttatgttttgggtttttataatgtaattttttttaaaaataaattttttaggatgggtgggtggtttatgtttgtaattttagtaatttgggagattaaggtgggtatattgtttgagtttgggagttgaagataagtttaggaaatataaggagattttgtttttataagagatataaatattagttggttatggtggtatgtgttagtaattgtagttattcgggagtgttgagttggaagaattatttgagtttgggaagtggagtgttgtagtgagttaaggttaaataattgtatttcggtttgtacgatagaatgatattttgtattagaaaaaaaaaaaaatagaaagaaaaaagtaatgtgaaaagaaggatattaaataagaaaagttttaattttggtgaaaaatgtttttattttttaaagtaaaaatgttttatagggatatatattatttataatttttttaagagttatgaggtggggttaggggaatagtggtttatatattttaaaggttgtgttattttttttcgttaagttttttaatgattgagaaattttttattgtgtgaatttaattgtatatatatttttttaattttgttttattttttaagttttattttttttttattttgatttatttaagggttggtgaagaaaattttttatggatatattatttgatgtaggttatagttttgattttttaatgggaagaaaaataaagatatgtatatgtatgtatagtgagtattttttaatatatgtataggttttgttaaaaaggaaggcgaagtatatttttagttttagttatataagaagggaggagagaaaagttatggtcggtgagttttttattgttttaagaataggtttttgggaagaaagagttttggaaggggttggtttttttggaagttataattagtatttgtggaagtttatttgagtagaagtaaggaaaaggggggagagggaggagagaaggaattagaagatttttgtagattttagaaaggaaaggtaagtttagaaaggaattgaggttttaggggaagtttgatgttattttgtaattttaattaaatttttatttatatgttgaaagtttgatagagggtatagaattggtataggaggagtattagtagtagtggtttttaaatgaaatgggttatttttgttttattattttattaattagagttaaataaatatgcgatataagaggatgatttttgttttttagggattgatgtggaaatggtaaatttagtttttaggttattttatgtatatgtatggagattattgagggaaataagtaggatagtaatatagtaagaagagggattatttaattgtgaggagggggatattttattgatgaaatttaaatgaggttattttttgttgattatatgagaggaatatgaggttgtttttatgatgtgagaaatttttgtgttttaaatagataaggttttgaaggagaagagaaagttgtttattcgttttatgggtgaaggtataataaatggtttattggatgaattattatagataagggtgttgaataaggaagagatggagaaagtaaaacgtgaaaatgttatagttatggataagattcgagttttgattgatttcgttatttcgaaaggggtataggtatgttaaatttgtattatatatatttgtgaagaagatagttatttggtagggacgttgggatttttagtaggtaagggttagtgatttatatttaagtttatttagggtttgttttcgtgtttaatatttgatttttttattagttatgttaattggaagaaaatttttttatttttggttttagggttatatttttgtagtagggtttttattgtatgttttttgatttttttttgatttttttttttaatttttagtggtatttttttgattaaagtttattttttgttttgagtatgtggtagtttttttattgaagtttttgagaattatttgaaaagttttatgttgtgttttttagtgtttttggtaaggtaaaatatttatttgtggatttatttttgttgagtgtaaggggtttgtaggtatttatgtagttgtaaagttatatgaagttttaaggtttataattaaatattttttataatttttttttaaaattttatttttttaaaagaataaaatatattttaatgatggcgatatatttagagaatatattgaacgtatagaaaagtgaagatttttaatgggtttatttttttagttgtttttttgtattttttttgagtaagattatttggttgtttgttattaggttgtgggttatgttgtgaggtttggaaattttttatttgtaattttttttaggtttaatatagggtttaggaattgagttggttaaattttatgattatttggatttattacgtggtgaggatgagagttttggtggatttttagttattgatgtttgtggtattttttaaagttattttagagggagatgttttttgaaagtaaaagttttttgttttaagggttagggaaagtttatgtttgtttaagtagatattgtagatgtttttgtttttatttatgtgtaataaatacgtatttttttattaatgttttttttattttttattttttattattttttaaattaaagaatatttttaatattatttaatgttagttagttagttagtgttatgggagaaatttttagtggggagtgttttatagattggggtaaagttttttagagatgataagtgattattttaatattttttatttttttatagattaaatatttggaaattattttaatatgtaagatttttaaggagtattttttttttttttaggtaatgttgtttttaaaggaagagtattttttgatttatattttttttgatattaattttgtaggattaaacgtgggtaaatgggttatggagaatttttatagattggttatataattttttttttgtaatttattttgtttttgtagaaattgtttttatagttttattatttatatttatattaaaaattttgaatttgtgttttaaattttgattatttaaataagtattaaattttattatttaagtttattgaaatatttatttttattttttagagatattttattttaaatttttttagagttgaaaatgttatatttttatattttgtttttttttcggttttgtgtaatttggttattggtgttatcgttattagttgtttaaattaggaatttgaaatttatatgggattttttttttttatgtatttttaatatttaatttatggttaagttttatgtaggttttttttaaatttggaattatttttttatttttatttttattattttattaaagaatttttatttttatagtgtatttttaaatttatatttgaaagtaatgtagaggttaggaatgtaaattatttattaagtttagatattattttattgaatttattaaggttgggtattatgaatatttttttaaatgttttatagtatgggatatttaatatataaagaaatattgtattttttattatgaaaaaatagtttaaaaataatttaattatttttagtttttttttattgtttttatatttttttatgaagaaatttaatattttatttaataaatgattattttataattttttttaatatatttattttaattcgtttttttttatattagtatattttatgttgtttttgtttatttaattgattgtataataattttttaaatttgtttttaaaattaaatattattttttgttttaatagtttttaaaagattttttatatatttagaaaatttatttttattttaaaataaaggttatattaatttttttaataaggatattatattgttggattgtgttgaatttgtgatgaaataaaaggtttaaggatttttttatataaattttgtgaaaatatttttttaagtgtttgtgtaatgaatgtttagtgttataaatttatttagtgtgtattttgattttagtatttattattatatttttattttattttatatatttaatatttatgtttttttatatgtatatatagaaggaagagattttgaaggataggataaagatttattaaaaaatatttttagtgtttattattatgtatattaagtaaataaataaaaagataaatatgtattttaaaaaatattttagtagattaaattaagatttgattttattaaattttattttagggtttgaatattttgaaaaaagtttatatttttaattattttattttatatattttttgttttttgagtgttttattaggtatagattttaaattttttttttttatgttagtatttaaaatgtttgtagaaaggttgattttgaaatatgaaagaagatatttgtaatgtatatttggaaattttttgtttgaaatgtgttttattaggagtaaatttatttagttgtgttaatgatgtagattaggattgttttttttagagtgtatttttttttttgtggttttatttataggtgaggttgtaataaatataaagtggaataaatagggatgttattgtttatgatgttttttgttttttgtagt

SEQ ID NO: 28 - DNA, 8201 bp, Artificial Sequence
  chemically treated genomic DNA (Homo sapiens)
gttgtaagagataaagaatattatgaatagtggtatttttgtttgttttattttgtgtttgttatagttttatttatggatgaagttatagaagaggaaatgtattttgaggaggataattttgatttatattattaatatagttgagtgagtttgtttttaatggagtatattttaagtaagagatttttaggtatgtattataagtatttttttttatattttaggattagtttttttataagtattttagatattaatatagaaagggaaaatttaaagtttatgtttgataaaatatttagaaaataaaaaatgtgtgagataaaatagttaagaatataaattttttttaaaatatttaaattttaggataaaatttaatgggattaggttttaatttaatttattaaaatattttttaaaatatatgtttatttttttatttatttatttaatatatatggtagtaagtattaggaatattttttaatgaatttttgttttgttttttaggattttttttttttatgtatatatatgaaaggatatgaatattgaatatatgaagtagaatgaagatataatgataaatgttaaaattaaggtatatattagatggatttatagtattaaatatttattgtatagatatttgaggaaatgtttttatagagtttatgtgagaaaatttttgagttttttattttattataggtttaatataatttaataatgtgatgtttttgttaaagaaattaatgtaatttttgttttaaaatagaaataagttttttagatgtgtggaggattttttagaagttattaaggtaaaaaataatatttaattttaaaaataaatttgaaaaattgttatataattagttagataaataaaggtagtatgaaatgtgttgatgtggagaagaacgaattagaatagatatattggaaaaaattatagaataattatttgttggataaaatgttggatttttttataaagaagtgtgaaaataatagaaaaaaattagaagtagttaggttatttttgagttatttttttatagtagagaatatagtatttttttatatattgaatattttatgttgtgaaatatttaagaaaatatttatgatatttaattttaataaatttagtagagtaatatttgaatttgataaataatttgtatttttagtttttatattgtttttagatataagtttaagagtgtattatgggaataggggttttttaataaaataatagaagtagaaatagagagatggttttaaatttgagaaaagtttgtataaaatttggttatgggttgaatgttagaggtgtatgagaaggaagggttttatatgagttttaagtttttggtttgaataattggtgacggtggtattaataattaagttatataaaatcggaagagaagtagggtgtggaagtatagtatttttagttttgggaaagtttagaataaggtgtttttgggagatgggagtgaatattttagtaggtttaaataatgaagtttggtatttatttgggtaattaggatttgagatatagatttagaatttttaatataaatgtggataatgaagttgtggaaatagtttttataaaagtagaatagattataaaaagaaaattatatgattaatttatgagaattttttatagtttatttatttacgtttgattttataaaattaatgttaaggaagatgtgggttaaagaatgttttttttttaaaaatagtattatttggaaaggaagaaagtattttttgagagttttgtatattaaggtaatttttagatgtttgatttatgaaaagataaagggtattgaagtagttatttattatttttggaaaattttattttaatttgtaaaatattttttattaaaaattttttttataatattgattgattgattgatattaaataatgttaaagatgttttttaatttagagagtggtgggaggtagaaaatgaaagaggtattggtagaaaaatacgtgtttattatatatagatgaaaatagaaatatttgtaatgtttgtttagataggtataagttttttttaatttttagaatagaaggtttttgtttttaaagaatatttttttttgaagtggttttaggaagtgttatagatattaatgattgggaatttattagaatttttatttttattacgtggtaggtttaagtggttatgagatttggttagtttagtttttgagttttgtattgggtttgaggagggttgtaagtggaggatttttaggttttatagtatgatttatagtttggtaataggtaattaggtgattttatttaaagaaaatataaggaggtaattggaggaatgagtttattagaaatttttatttttttatacgtttaatgtgttttttgagtgtatcgttattattgaaatatattttatttttttgggagggtaaaattttggagaaaagttataaaaagtatttgattataaattttaaagttttatgtgattttataattatataagtgtttatagattttttgtatttagtaaaaataaatttataggtaaatattttgttttgttaggaatattggaaaatatagtatgaagttttttagatggtttttaagagttttagtaaaggagttattatatatttagaataggaaatgagttttaattagaagagtgttattgaggattaaggaaaagaattaaaggagagttaagggatatgtaatagggattttgttatagaaatatggttttgaagttagaaataagaaagtttttttttaattaatatgattagtaaagaaattaaatgttaggtacgaagataggttttaggtgaatttgagtgtaagttattgatttttatttgttgagagttttagcgtttttgttaggtaattgttttttttataaatgtatgtgatgtaaatttggtatgtttgtgtttttttcggaataacggagttaattaaagttcgggttttatttataattgtagtatttttacgttttattttttttattttttttttgtttagtatttttgtttgtaataatttatttagtaagttatttattgtatttttatttatggaacggataaatagttttttttttttttttaggattttgtttgtttagagtataaggattttttatattatgaaaatagttttatattttttttatgtaattaatagaaagtgattttatttagattttattagtgaaatgtttttttttttatagttgggtaatttttttttttattgtattgttgttttatttgttttttttaatagtttttatatatgtgtatggagtgatttgaagattgagtttattatttttatattagtttttggaaagtagagattatttttttatgtcgtatgtttatttaattttggttaataaagtaatgaagtagaaatagtttattttatttaggaattattgttgttagtattttttttgtgttaattttgtattttttgttagatttttaatatgtaagtaagagtttaattaagattgtaaaatgatattaggttttttttaaagttttagtttttttttgggtttgttttttttttttaaagtttgtaagaattttttagtttttttttttttttttttttttttttttttttgtttttatttaagtaaatttttatagatgttaattatggtttttagaagagttagttttttttaaaattttttttttttagggatttgtttttggaatagtaaaagatttatcggttatggttttttttttttttttttttgtgtgattgaaattgaaagtatgtttcgtttttttttttggtagggtttgtatatgtattgggaaatatttattgtgtatgtatatgtatgtttttatttttttttttattaaagaattagaattgtagtttgtattaggtagtgtatttatgggaaattttttttattagtttttggatagattagggtaggaggggaatggggtttggagagtaagataggattgaaaaagtatgtgtataattaaatttatatagtgaagagttttttaattattagaaagtttgacggagaaaagtaatataatttttggagtatgtgaattattgtttttttgattttattttatagtttttgggaaagttgtgggtaatgtatgtttttgtgaaatatttttgttttaagaaatagaaatattttttattagaattaaagttttttttatttaatgtttttttttttatattgtttttttttttttgtttttttttttttttgatatagggtattattttgtcgtgtaggtcggaatgtagttatttgattttggtttattgtagtattttattttttaggtttagatgatttttttaatttagtattttcgagtagttgtaattattggtatatgttattatggttagttaatatttgtattttttgtaaagatagggtttttttgtgttttttaggtttgtttttagtttttaggtttaagtaatgtgtttattttggttttttaaattgttaggattataggtatgagttatttatttattttggagggtttatttttgagggaaattgtattgtagaggtttagagtataggttttggaatgagaatgtcgaatttagtattttaaattttttttttttggtaagataatgaatttttttatgtattggtttttttgtatgtgaaataattttattaatagtatgtatttatatagttttgagtattaagtgagagaaaatgtggaaaatgtatggaatatagtttggtaaatggtaagtaaataatgagtgatattattataattaatataaatgtttaaggttagaaaaataattaaggatgattatttgtagattatttagttaagtttattttttgttagaatttttaagtagtgtatttagttatttatttagtaaatatatacggacgatattgttttaggtgttagaggtttagttaaaatatattatggtttttttttttttggttttatatttaagagggaaagataaatatgaaggttggtgatatggtttgtttttgtttttttatttaaattttattttgaattgtaataatttttatgtgttatgggaggtatttggtgggatgtaattgaattatgggtgttgttttttttttatgttgtttttttgataatgaatgttttatgagattcgatggttttataaaagggaatttttttgtttatatttttttgtttgtatttatgtaagacgtgtttttgttttttttttgttttttgttatgattttgaggtttttttagttatgtggaattgtgagtttattaaatattttttttgttttatataattatttagttttgagtatgtttttattagtagtgtgagaaatgattaatgtagtaaatttatattgagtaatggagtgttgttgtaaagatttttaaaaatgtggaagcgatgttggaattgggtaaaatgtagaggttggaatagttttgagggtttagagaaagataggaaaatagaatttggaattttttagagatttgttgaatggttttgattaaatgttgtttatttcgaatgaagataggaatttgttgggaagtggaataaaagtgattgttgttgcgttttagtgaagagagtggtggtattttgtttttgttttagagatttgtggaattttgaatttgagagagatgatttagggtatttggtagaagaaatttttaagtagtaaagtattttagaagtgatttgggtgttgttaaaagtatttatttttatgtatttgtaaagatatggtttggaattggaatttatgtttaaaagggaagtagagtataaaagtttgaaatattcgtagttagatgatgtgttgggaaagtaaaatttattttttaaggagaaatttaagttaattgtagaaatttgtagaagtaacgaggagttaaatgttaatttttaagatattaatttttaagataatggggaatatgtttttagagtatgttagagattttttaggtagttttttttattataggattggagatttaagagggaaaaaaatgtttttatgaggtaagtcgagggtttttttgttgtatgtagtttaaaggtttagtgtttttttttttgggttattgaagttatggttaaaaggggttaagaaatagtttgggttgtgattttaaagggtgtaagttttaagttttggtagtttttatgtggtgtggagtttgtaggggtatagaagttaagaattgaggtttgggaatttttgtttagattttagaggatgtatggaaatgtttgtatgtttaggtagaagtttgttgtaggggtgggatttttatgaagaatttttattagggtaatgtagaagggaaatgtggggtgtgagtttttatatagagtttttattggggtattgtttagtggagttatgagaaaagggttattattttttagattttaaaatggtagatttataaacggtttgtattatgtatttggaatatttaggtatttaatgttaatttatgaaagtagttaggagggatgttgtatattgtaaagttacgagggtggagttgtttaaggttatgggatttcgatttttgtattagtatgatcgagatatgagatatggagttaaagattattttgaagttttaagatttggttgttttattggatattggattcgtatggggaatgtagtttttttttttggttaattttttttatttggaatgggtgtatttatttaatgtttgtattttcgttgtatttaggaagtaattaatttgtttttgattttataggtttataggtggaagggatttgttttgttttagagaagattttggatttggatttttgggttaatgttggaatgagtgaagattttgaggaatagttggaaggtaggattggttttgaaatgtgagtatatgatatttaggagaggttaggggtagaatgatagagtttggttttgtgtttttattaaaattttattttaaattgtaataattttttggtgttatgggaggtatttggtgggaggtaattgaattatggaggtgggttttttttatgttgtttttatgatagtgaaaaagttttatgagatttgatggttttataaaggggagtttttttgtatatgtttttttgtttgtttttatggaagatgtgtttttgttttttttttgttttttattatgattgtgaggtttttttagttatgtggaattatgagtttattaaatttttttttttttttataaatatttagttttgggtatgtttttattagtagtatgagaatagattaatatatttggtatgtaatatgtaattggaatatttagattgtttaaatgtagtaagtgatgagaatgataaaaaaaaaattggtaaagtaggagataaaatattgtaggatttatgaattttagatagaggagttagggaaggttagaaaaggtttttgtttttgtaattatatgtttaattgtttattttagaaataaatttaatgtggttaatttattttataaatttatttgatgaaaggtgggttaattgtaaaatgtatacggtatgttacgtttattaaattttttattaaaaatttttttgatttgttattttaatatttttggagattaaagatttagagttagaaaaatatttattttttgatatgtgggttattagttttattttttgtgttttaggtgaagggttaaatgtgtttgggtttgattagaatttattgtgtaggaggatatcgttttttttttttattttttattttttgatagagtttcgtattgttattttattggagtgtaatggtgttattttcgtttttcgggtttatgtgatttttttgttttagttttttaagtagttggaattataggtattattatatttggttaattttttgtatttttattagagatggggttttattatgtttattagattggttttaaatttttgatttcgtaatttggttattttggttttttaaagtgttgggattatagatgtgagttattatgtttaattttttatggtgttttatt

SEQ ID NO: 29 - DNA, 7603 bp, Artificial Sequence
  chemically treated genomic DNA (Homo sapiens)
ttggttacggatattttaatttagtggtgttagaggaattagatatatatatagaaatatagagtgtggagtgggaaattagggggttgatagtttttagagttgatagtttcgaatagagagttatttatatatttattgatattaagttagtgataagtattgtttttatagattatagattaattaaaagtattttttatgggaaataaagggatgggtcgaaataaagggatgggttttggttagttatttgtagtaggaatatatttttaaggtatatattatttatgttattgtttgtggtttaggaatgtttttttgtagtttttcgttttgggtgggttaggtgttttttgtttttatttcggtaaaataatagtttttagcgtggttattatggttattaagaatatgttatagtgttgtagagattttgtttatggttagttttcgggttagtttatggttagatttgggggattgtttttaatattagggtgtggttgtagttatttttttaggtgtaggatttgggtatttttgtagtttgtattttgggggttttaggaaggatttttttttattttatttcgtaggtttgggggtgtttgttttcgttgtttggtttttttttatttttggtattttttttaattttgaagtggggttggggttaagttttggggttttgaatggtaatgggaggtagaagggggtaggtttttagtaaggtttttttttaggttagggagggttgaaggttgggggtggggttgttagttttgtggattgtagtagggatttatggtgttttttttgggtgttcgtggataaattggtagttatttttttttttttgaggtttataaaagttttgggtttagttagagtagggtagaggatggttagaggataaagagggtagagaggtggtgggatgattagttgtagagaggagtattttttgttgatagttggagataatgggatggttggttgtagagaagagttattttttttattgagagttgtagagataatttgttagtagagagaagttattttttttagggttttttttttattgagaattgagtattggatagatgatttgtttatagagaggagttatttattgtgggttttttttgagttgttttagtattaaataaagtttttttttattttgtttattttttatttgtttgtgtattttattttttttggacgtaggttagaattcgggtaaaggtgttgtagttagagaggtttttagttagaaaattgatattttaaagatttcgtaataaaggtatggagtaaagtgggggtaaggaggttttggaggttgggggtgttaaatttagaagatttgttattttaagattttttgaggatttttataggttggggtggaggttttagtgttttgagtttttttttagttagtatatttttttttttttttttatggtttatgttaattttttaggagttattattttttttttttggatggagtttcgtttttgttatgtaggttgtagtgtaatggtatgatttcggtttattgtaatttttgtttttcgggtttaagtgatttttttgttttagttttttgagtatttgggattataggtatgtgttattatgttcggttaattttgtatttttagtagagatggggtttttttatgttggttaggttggttttaaattttcgattttaggtgatttatttatttcggttttataaagtgttgagatgataggtgtgagttatcgtgtttagttaggagttattattttttagtttatttagatagagggtggggaatttggattatagattgtatgttaaggaaagttaattattgttattattattttttattaatgtggaattaaagtagtagttgatatttatttttataaaaggttatgaaggttttgattggttttttacgtgtatttagtagattgtaattaattaggaaagagattgtaagacgtgtttattttattattattaatatgtttttagtaattgtgtgtaggaggaagtagaaaatgttgagtataaatatttgtattgtacgttattttttttttgtaatttgatttaaatgtttttttggagtagtaggataaaagttatagttttattttttgggtttttattttatttttattttttagatttagattaaatatttttttttttaaggaatgtttgattgattgtttttttttaaagtttttgtggtattaaagtgaagttttattgtggtattattattttttgttcgtagttatagatgttatacgatgttatattgagattcgggtaatggtagttcggggattaagagtaaggggttcggagttagagagatttacgtttgagttttgaatttttgtttatagttttgggatggtggtaagattttttgtttttttgaatttgggtttttttatttattgaatgtggataataatgttagttaaggttgggagttgttatgagtttattagagaagtttagaaatggtagtatcggtcgttatagttattatggaaagtaggttattttgttttttaattgtgtttaatttagggttttgaattgtttgttaaatatttaatattattgaattaaagttgaaagagttaatatattttatgaatagagtgagagaaagtgatagttttaataagttgtttttttaaatggtttaataaatttaatatttataataaaataattaaatagaagattaagatttacggtttgtttttttttttttttaagttattttttagaaaataatatttatattttaagttaaagtaattgtaaattggaaattatagggggagttttaggttgggataaataatgattagtttggttttaatagaataggtaaagaaggtggtttttatattttttatggttagttggggttttttttttattttgttgtagtattttagggttagggttttattttttttggaattggggtagtgagtaatttagtttgttgtgtttcggttttttttttttaagaaggttttttttttttttttttttgagagagtttttttttgtcgtttaggttggagtgtaatggtacgattttggtttattgtaatttttgtttttcgggtttaagcgattttttagttttagttttttagtagttgggattataggtatgtgttattaagtttggcgaattttatgtttttagttgagatgtggttttattatgatggttaggttggttttgaatttttgattttaagtaatttgtttattttagttttttaaagtgttgggattataggtgtgagttattgtgtttggttaggatttgttttttttttttttttttttttttgagaaggagttttgttttgtagtttaggttggagtgtgatggcgtgatattcgtttatcgtaatttttattttttgtttttaagcgattattttgttttaatttttcgagtagttaggattataggtgtgtgttattacgtttagttaattttttgtatttgtagtagagatagcgttttattattttggttaagttggtttcgtgattcgtttgttttagttttttaaagtgttgggattataggcgggagttattgtatttggttttaggatttgttttttttaagtatagaagttttttgaatgatgtttaggatatggaaaggatattttaatatatttgttaattaaagtattataaattttgttttttttttttatagataaaatatttttttaagattttgtatttttttttagagtgttgtatatttgagttagtttaattatagtgtagtgattttgatttaaatttgttggtttaaattttggtttttttagtcgtttattgtgtgattttgggtaaattaattaatttttttgtgttttagtttttatatgttaaagtagtagttatagtaatagtatttattttatagtgttgttgggatggtgaaatgagtaaatatttgtaaatgttttggtatatggtagttgtaatattagtgtgtagtattgtttttatgattagaaataatgtttttaaagttttatttttttgttggtttgaatgtgttgtgagaatatatattgttagttttgtttattataaatttgttgagttttttgtaggtatttttaaatgggtttgtaatttattatttttatttttttttttttttttttttttttttttttttattttttaattttttttataaagattgaaagtgaatttttattttttttttattttttaaaaattttatttgtgggtcgggtacggtggttttatgtttgtaattttagtattttgggaggttaaggagggtggattataagtttaggagttcgagattagtttggttaatatggtgaaatttcgtttttattaaaaatataaaaaattagtcgggcgtggtggcgtatgtttgtaattttagttattcgggaggttgaggtaggagaattatttgaatataggaggtagaggttgcggtaagtggagatcgttttattgtttatttgtatgtggatataagaaagggttaatatggtcgataattattttatgagttttttggttttatttgaaaagtgaagtgtgtttggggaaggagttggttaggaaaatagatgtttttttttttgatttattaaggaaatggagatttaaaggaaagtttgaagtattttgtggtttttacgggttcgtttttaggaagtttttgttttatttggggaaattttaagttttatagtgagaaagttgtaaattagtttttaggagacgttgtttgttaaagttattttaattttggaaaaggggagggaaaaaggtagataagtagtgatgatattagtaggaaattagtattaggttatttagttttgaagatttagtttttatttaaataattagtaagttttgaagtttttttttaagtaaatgggagtttttttggattttggagtatatagaggattttattttttttaaaattttgtttttaggtaatttttttgagaatcgtttatttttagaagattggtggagtttgatttgaaggtatgtaattaataattttttttattttagagttttatgtttgaatttttttttttgttttatggtttcgtgttgtagaaatttgtaaaaatttgttagtaatggtattatttttttttagatttttttgttatgtttgggaaaataaaagttaaaaaattcggaagtttttaatatagttttttatcggggtagaaatatgttagtttatagagataaagtttggtagatttattaaaattagagattagaattgttaagaaattataaggtaaatgttagatgcggtagaatagaaaggtgtttttaataaattatttatttgattttagggttagtagtagggaagattttttggattattatattaaaaatgatatttttttgttttttttaatattaaaagtaatgtgtatgtttatatatgtataaaatttgagaaatttaattggaagtttagaaggaaatttgtattatttatagttatgttatttcgatataattattgtttgttatggaggttttgatttttgttgtgtttttttttttttatttatttatttatttatttatttatttatttatttatttatttgagacggagttttttttttttattttttagtatttaagttggagtgtagtggtataattttggtttattgtaattttcgttttttaggtttaagtaatttttttattttagttttttatgaagttgggattataggtatatattattaagtttagttaatttttgtattttttgtagagacggggttttatcgtgttgtttaggtttgtttcgaatttttggttttatagtgatttatttgttttagttttttgaagtgtttttttgattataatgaaatttagtatgtagaatattatagtttatagattagttagatggaaatattgatttatgtaatttttattttttttcgttgatttgagtaatttttgtttaaaattattttttttttttgaggtttaggaggtttttttgttgttgttttgttttgtttttgaggtagggttttgttttgttatttagggtggagtgtagtggtataattatggtttattggaatttttattttcggggtttaaatgatttttttgttttagttttttgagtagttgggattataggcgtgtattattatgtttggttaatttttgtattttttgtagagatggggttttattacgttgtttagtttggttttgaatttttggttttaagtgatttattcgttttggttttttaaagtgttgggattataggcgtaagttatgatattttatttgtttttttttttataaagtatttttttgtttttaaaaatagttaagttttgtatattgattatatattttaagtgtttatagaataaatagtattataatgaaaattttattattgtattgtttttttgattatgatgaaatttagtatagagaatagtatagtttataaattgattagatggaaatattgatttatgtaatttgtttttttttagtgaaaataagtttattagagaagtaaagaaataaaagaatggttattttatagatagagtagtcgatttatgtaatttttaattttttatattgatttgagtaatttttgtttaaaattattttttttttttgaggtttaggatattttatttatttatttttttttttgaaatagggttttattttgttatttagggtgaagtgtagtggtatgattatggtttattgtaatttgtgttttttaggtttaaatgatttttttattttcggttttttgagtagttgggattataggtatgtgttattatgttttgataattttttgtatttttagtagagattaggtttcgttatgttgtttaggtttgaggtttaggattatgttttttttttttgtaagataaaggtttgtttttttataggtagtagtttgaagttaagatgtaatatatatattttacggtattttgttgtttttgggttgatagattataaggataattttgttttttttagattgttttgtgtttaaaatttaaagtatagagttaagtgttatttttgttacgtgttggaaatgaatgtaagggttttaattaggttattaggtttgagaaaaattgtgttgtgtttttttattttaattttttttttttgggaatattttgatttgggagaaattaaggtgaattgaattttaatataagtattttttaagttttttaaaaagtaatttgtaagtgttggggaaaagttttttgggttgttgttttttgaagtagtttcgtcgtaatttttattttttagtatttttaggaaagtttaatgtttagaacggagaaggttgtggtgaggggagggtttgggaagttagggggttatatgtttttattttttaattttttgttttatttttttgttttttttagg

SEQ ID NO: 30 - DNA, 7603 bp, Artificial Sequence
  chemically treated genomic DNA (Homo sapiens)
tttgaaagggatagagaggtggggtagggagttagagagtgaggatatatggttttttgattttttaggttttttttttattataatttttttcgttttgggtattagatttttttagaagtgttgaaaaataaaaattacggcgaggttattttaaaaagtaatagtttagaaaatttttttttaatatttgtaagttattttttaggaaatttggagggtgtttatattggaatttaatttattttgattttttttaaattaaaatgtttttagagagagaaagttaagatggagggatatagtataattttttttaagtttggtagtttgattggagtttttatatttatttttagtacgtggtagaaatagtatttggttttatgttttaagttttagatataaagtaatttgggggaggtagggttatttttatgatttattaatttaaagatagtaaggtatcgtgaggtatgtgtgttatattttaattttagattgttatttgtaagagggtaggtttttattttatagaaagggaaggtataattttagattttaagtttgagtaatatggcgagatttggtttttattaaaaatataaaaaattattagggtatggtggtatatgtttgtggttttaattatttaggaggtcgaggatggaaggattatttgagtttggggagtataggttgtagtgagttatgattatgttattgtattttattttgggtgatagagtgagattttgttttaaaaagaaaaataaataaataaaatattttagattttaggaggaaagggtggttttagataagagttgtttaaattagtgtaggaagttaaaaattatatgagtcggttgttttgtttatggagtagttatttttttgtttttttatttttttaataaatttgtttttattaaaaaaaaataaattatatgagttaatgtttttatttgattagtttataaattatgttattttttatattaaattttattataattagaggagtaatgtagtgataaaatttttattgtaatattatttattttataagtatttgaggtatgtagttaatatgtagaatttggttatttttagaaataagaaaatattttataaaggaaggaataggtggggtgttatggtttacgtttataattttagtattttgggaggttaaggcgggtggattatttgaggttaggagtttaagattagattgggtaacgtggtaaaattttatttttataaaaaatataaaaattagttaggtatggtggtgtacgtttgtggttttaattatttagagggttgaagtagaaggattatttgagtttcggggatggaggttttagtgagttatgattgtgttattgtattttattttgggtgatagagtaagattttgttttaaaaataaaataaaataataataaaaaaattttttagattttagaaggaaagggtgattttagataagagttgtttaaattagcgaaggaagataaaaattatatgagttaatgtttttatttgattagtttataaattatggtattttatatattaaattttattataattagagaagtattttaggagattgaggtaggtggattattgtgaggttaggaattcgggataagtttgggtaatacggtgaaatttcgtttttataaaaaatataaaaattagttgggtttggtggtgtatgtttgtggttttagttttataggaagttgagatgggaggattgtttgaatttgggaggcggaagttgtagtaagttaagattgtgttattgtattttagtttgagtgttggagggtgaaagagggagatttcgttttaaataaataaatagataaataaataaataaataaataaataaataaaggaaggaagatatagtaaaaattaaaatttttataataaatagtggttatatcgaggtgatataattatagataatataaatttttttttgggtttttaattgaattttttaaattttatgtatatgtgagtatatatattatttttggtgttaaaagaaataaaaaaatgttatttttaatgtgataatttaggggattttttttgttattagttttgaggttaaatgagtggtttattggagatatttttttattttatcgtatttagtatttgttttgtggttttttgataattttgatttttagttttagtgagtttattaaattttgtttttgtgagttaatatatttttgtttcggtaaaaggttatgttggaggttttcggattttttaatttttgtttttttaggtatgataaagaaatttaagaaaaaatagtgttattgttgataagtttttgtaagtttttataatacgaagttatgaagtaaaggaaaagatttaagtatgagattttggagtaagaagggttgttaattatatatttttagattaagttttattaattttttggaagtaaacggtttttagggaaattgtttgaaaataaagttttaaagaaagtagaattttttgtgtgttttaaggtttaaagaagtttttatttgtttgggaagagattttaagatttgttggttgtttaagtgaaaattgaatttttaggattgggtagtttgatattagttttttgttgatgttattattgtttatttgtttttttttttttttttttttagggttaagataattttgataaatagcgttttttaaaggttaatttataatttttttattgtagagtttggggtttttttaggtaaagtaaaagttttttagaaacgaattcgtggaagttataaagtgttttaggtttttttttggatttttatttttttggtaagttaaaaagggaagtatttgtttttttaattaattttttttttaaatatattttattttttaaataaagttaaaaagtttatgaaatagttgtcggttatgttaatttttttttatgtttatatgtaaataaataatggagcgatttttatttatcgtaatttttgttttttgtgtttaagtgatttttttgttttaatttttcgagtagttgggattataagtatgcgttattacgttcggttaattttttgtatttttagtagagacgaggttttattatgttggttaggttggtttcgaatttttgagtttgtgatttattttttttggttttttaaagtgttgggattataggtatggagttatcgtgttcggtttataaataaaatttttaaaagataaaagaaaagtggggatttatttttagtttttgtgggagaaattaagaaataaaaagaaaaagaaaggaaaaaaaaaagaaaagtggggatggtgaattataagtttatttggaggtatttgtaagagatttaataaatttgtggtaggtaaaattgatagtatgtgtttttatagtatatttaaattagtaggaaagtgagattttgaagatattatttttaattataaaaataatattgtatattaatattgtaattattatgtgttagggtatttataaatatttatttattttattattttaataatattgtaagataaatattattattatgattgttgttttaatatgtgaaaattaaggtatagaaaggttaattaatttgtttaaggttatatagtgagcggttggaagagttaagatttaaattagtaagtttggattaaagttattatattataattaagttaatttaaatgtgtagtattttggaaagaggtatagagttttagaaagatgttttatttatggggaaaaaaagtaagatttatgatgttttgattagtaaatgtattaaaatgttttttttatgttttaggtattatttagagaatttttgtgtttaagaaagataagttttggggttaggtgtagtggttttcgtttgtaattttagtattttgggaggttgaggtaggcggattacgagattagtttggttaagatggtgaaacgttgtttttattataaatataaaaaattagttgggcgtggtggtatatatttgtaattttagttgttcgggaggttgaggtaggataatcgtttgaaggtaggaggtggaggttgcggtgagcggatattacgttattatattttagtttgggttatagagtaagatttttttttaaaaaaaaaaagaaaagaaaaagataagttttggttaggtatagtggtttatatttgtaattttagtattttgggaggttgaggtgggtagattgtttgaggttaggagtttaagattagtttggttattatggtgaaattatattttaattaaaaatataaaattcgttaggtttggtggtatatgtttgtaattttagttattaggaggttgaggttggagaatcgtttgaattcgggaggtagaggttgtagtgagttaaaatcgtgttattgtattttagtttgggcgatagagaaagatttttttaaaaaaaaaaaaaaaaaaaatttttttgggaaaggggggtcggagtatagtaggttgggttatttattattttagttttagggaaggtggggttttgattttagaatgttgtagtagagtgaggagggggttttaattgattataaagagtgtagggattattttttttgtttgttttgttgggattaggttagttattatttgttttagtttggggttttttttgtggtttttaatttgtagttattttaatttaaaatataaatattattttttggaaaataatttaaaaaggaagaaagataagtcgtaagttttggttttttatttagttgttttattataaatattaaatttattgggttatttagggaggtaatttattgaaattattatttttttttattttgtttataaagtatattaatttttttaattttgatttaataatattaaatatttagtaggtaatttaaagttttgaattgggtataattggaaagtaaagtgatttgttttttatagtaattatggcgatcggtattattatttttaaatttttttgatgaatttataataatttttagttttagttggtattattatttatatttaatagatgaggaaatttagatttagagaggtaaggaattttgttattattttaaagttatgagtaagaatttagggtttaaacgtgggtttttttgatttcgaattttttgtttttgattttcgggttattattgttcgaattttagtatgatatcgtgtagtatttgtaattgcgggtagggggtggtgatgttatagtgaggttttattttggtgttataggggttttaagaagggataattagttagatattttttggaggaggaagtatttgatttaggtttggaaggtaaaggtagaataaagatttaggaagtaaaattgtaatttttattttattgttttagggaaatatttgaattaggttatagaggggagatggcgtgtagtgtagatatttgtatttagtattttttatttttttttatatatagttattgagggtatgttgatggtggtagaataaatacgttttataattttttttttgattggttgtagtttattgagtgtacgtgaagggttaattaaaatttttatggttttttgtagaggtggatgttaattattgttttagttttatattagtagggggtagtggtagtagtggttggttttttttgatatataatttgtggtttaagttttttattttttgtttgggtagattaaagggtaatgatttttggttgggtacggtggtttatatttgttattttagtattttgtgaggtcgaggtgggtgaattatttgaggtcgggagtttgagattagtttgattaatatggagaaattttatttttattaaaaatataaaattagtcgggtatggtggtatatgtttgtaattttagatatttaggaggttgaggtaggagaattatttgaattcgagaggtagaggttgtagtgagtcgagattatgttattgtattgtagtttgtataataagagcgaaattttatttaaaaaaaaagagtaatgatttttaaaggattggtataagttatgggggaggaggaagggatatattggttagagaagagtttagagtattgaaatttttattttaatttatgagggtttttagaaggttttgaagtagtaagttttttagatttgatatttttaatttttaagatttttttatttttattttgttttatatttttgttacgggatttttggggtattaattttttggttggaaatttttttgattgtagtatttttgttcgagttttggtttgcgtttaggaagaatgaggtatatagataagtgaagggtgaataagatgaagaagagttttatttagtgttagaatagtttagaggaggtttatagtgggtagtttttttttgtaggtaggttatttgtttagtgtttagtttttagtggagaggaggttttggaaagggtggtttttttttgttggtaggttgtttttgtagtttttagtggagaaggtagtttttttttgtagttagttattttattgtttttagttattagtagagagtatttttttttgtagttggttattttattatttttttgttttttttgttttttggttattttttgttttgttttggttgagtttagggtttttatggattttagagaggaggaagtggttgttaatttgtttacgggtatttagaagaggtattatgagtttttattataatttataggattggtagttttatttttagtttttagttttttttggtttgaaggaggattttattggggatttgtttttttttgttttttattgttatttaaggttttaggatttggttttaattttattttaagattggagaaggtgttaggagtgaagagaggttaggtagcgggagtagatatttttaagtttgcgggatggggtgggagggggttttttttggggtttttagggtgtaggttgtagagatgtttaggttttgtatttaggagggtggttgtagttatattttggtgttgggaatagttttttaaatttggttataaattgattcgaaaattggttataaataaaatttttgtagtattgtgatatgtttttgatggttatgatggttacgttgaaggttgttgttttatcggaatgagggtaaggaatatttggtttatttagggcggaaaattgtaaaaaggtatttttaaattataaataatagtatgagtgatatgtgttttaaggatatgtttttgttgtagataattagttagaatttatttttttgtttcggtttatttttttgttttttataagggatatttttaattaatttataatttatagaaataatgtttattattggtttgatgttaataaatatgtgggtaattttttgttcggagttgttagttttaaaggttgttagttttttgattttttattttatattttatatttttgtatgtgtgtttaatttttttagtattattgggttagggtgttcgtgattaa

SEQ ID NO: 31 - DNA, 6853 bp, Artificial Sequence
  chemically treated genomic DNA (Homo sapiens)
ttatttaaatagaaggtaaattgtttagggttgtaattaatatataatatgcgtcgagagggaaaggttaatgttaatttcggttttaagtataaagattattgggagttaggggtgtatttttattagggtatagtatgggtgggtggagagagtaaaaattagaataaattaaggtttagtagttggaagttagttttagggagaaaaggggcggagattgattgggttagaatagggattgggatagaaaaagagggtggggttagtgggttttatttattcgtttcggttttttttattattttttattttatttattttttatagtttgtggagataggtgagcgacgaatttttgagataggtgtgggtgcgagggtcgggagggttatgggattgggatcgaggtgtgaggagggaatttgtaattttttgttatatagagcgttggtaatttttgataggttgtttttggggtatgggttgtttcgggttgttgttgttataaggaaagaaaagagtttttttgtttatcgttttttagttattgggttattttttggtaggaaatttgtaaattgagtttaataagttaggattagtagagggtagaggagggttttggtagatgtggggtttagaagaggataggagttattagggttttcggttattgtgttgggtttttgtttgtataattgttttttaagtagttgtgtttttgtggttttggtgcgtttgtgtgtattttttttttttatttggagtatgggttaatatcggaggaaaggaaaagatagagttagatagggtaagtggggttttttttttttttttttttaacggggttggattgagggtttttggttggggaggtgggggtggagatttagtaggagtaataatagaggaagggtagggtttgttttattatttgaattttagagatgttagtgtgtattgaagttttaggtagggcgtgtttaggatcggattttggatggtggtaagggataaagttggaagggagattatagggaaggagaaaggaaagaaggtagagttatgatatagttaatttatagaatggttgggagttaaagtttttgggttggttttttggttattttatatattttaagatatagagagaatttcggaattggaggggattttatagatgatttatttgagattgaagaatttagaaattaaataaagaaatattatatggttattttggtatttgatatagttatgatattaattgttagtgtagatataatagttgtgtgtttttttgtaggagtttggggaggggttatggtgttaatgtatttattggggagattggagaagtcgtttttttttttgtgttgcgttttttttttattggggttggttttgttgggtataaagacggatattattttcgttgtttattttttttttatattgggtggtttttttttgtttgtttattttttggttcggtttttggaatgggggtttcggttttagttttaattaatgtagattgagagtttagggtttttaggtaatgtacggtgagttaagggtgggtatcgtaagaggaatatattttgggtttattttttttttttttttgtagtttttgaggtagagagtttttggttttttgttattggtattagcgggaggaggggttagaggttaatagaggattttttgtttatagtagataaaaaaaagggaaaaagggttttttttatggaagttattaatggttttatttttttttttttagggataatgaagtttttgaagtgttagtttatgaagaggtcgtggtgggattagaattttagtgtcgtttttaagagttggattaattatttttttatagtattgttgtgatatttttagtatttgaggaggaataatttagttatttagaggggtttaggagagttaaattggaatagaggcgaatggttttagaggggtttatggtttaggaaggaagttttggaagagttttaattaattttcggtttcggggattacgggttgtgtttattgtttttgatttgtagagtttggcggtagtttttatattagagtttttgattttattttttgtttatgatgtttgttttggttattttgatgatgatagtgttttttatgaggataattgggtatttttttaaatgatttttttaagattttttttttttttatattagatttcgtttatttgattaatattttttagcgtttattatgtgttagaaataagtgtttttgtttggatattataaatggggatttggattttgaggagagttaggttacggtaagttttttttagttgagatatgggtggtataatttgagttttttggtaatatttggtgatttattttatatttaatatttttagcgttagattgaggatgaggtagggaggtgatttagagaaggcggagaaggaagaagtaatttttgagtggcggttattgtttttgttttaggtgttgttcgagttgttagaatttttaggtttgatagttttgtgagttattattgaaaaatgaggattttaagagttagaggagtttgataatgtgtacgagggtatattgttagtaaataatattaaaataattggaatgaatttttgattttaaagtttattgtgtttttaatataaggtaataggaagttaagtaatttgtatgttttttaatttttgtttagggatagttgttggtgtaggatggaagattttttataaatagaatgggcgattaattgtgtttatagagggggtgggttgagtatgggtacgtatgtttttagttttttggacgagtaaagttagttaaagcgttggtgatttttgtttcgcgtgcgtagtagtgtttgtgttttttttgtttaggggttagagagtagtttttagtgtagggtttttattttatttgaaaatagtggagttagtgattttaggtggagggatttttagttttaataatgggttggtatgaaggttagaaggagtgaaatatgtgaattttttggcgaggagatttttttttgaattatttatatgtagtttcggggttatttgcgaagagtttttaatagtttttgttttatttttaagttttgatcgttagtttttattttagtcgtcggttttgatttttgagattttaatattgagtattaggttttttggaattgtgtgttgcggttgtgatgtaggtttcggtcgttggaagttgttaaattatagttgacgtttttttttaagttagtttttttttttcgcgcgggtatttgtttagggttttgtcgcgtttttagtttttttcgtagtttggttttaatcgtttaattttaataaagtaaaattttagttacgttcgttttcgtgaagttatcgttataggtcggttagggggcgcgagaggtatcggggtgattttcgcgggaatcgataattaatcggatttttaggtcgaacggagtatattcgttcgttttcgtttttttttcgttttttgtttcgtttcgtttttttttttttttttgtttgttcgtcgagtattttattttattttattggatcgcgcggtcgtcgttagagttttgcgtttgcgtacgtatcgggtcggggattgggtggtttggtgtgtgggcgcggtagggcgtagcgtaggcgtagtgtgcgttcgcgtttgaggggagggatgtgggggaagcgacggttttcggtttgtttgggttgtgggcggtgcgtagcggagagttcgggaaaagcgggaaatggcggcgtcgagcgcggggttttggtttattttttagtataaggagttgatggtcgttgataggggacgtaggtaagtagggaacggttttagggttttttaggggagtttagggaaggggagcgtggtttttaggcgtgcggttttgtagtttttttttttcggagtttcggaaagtagtcgtgttcgcgttttttgttaagggtgggacgttcgttcgagtcgtttcgagtttgatttcgcgtaagggttcgcgggcggattttttggttttgtttttcgtgggaaaagattgttttagtttttttttgtttaatttacgagggttttaaaggggaggtttttgtagttttgttcgtttttgggtttttttgaagattttttatttttttttttggtttttttatgagggaaattataaaaagattatattttgtttttttaaaaatcgacgagattttttgtagatttcggtgttttgtttgatgtgtatttgatttgtatcgattgtattatgatttgtatggttttgttttggtagaataagggggtttttgtggtttcgagtgtttatgtttttgtttcggttattttattttatggtagttattatttaggagaatattgtaatgttttttgttcgagattgaagattaaggttttcgtaaagggaatttgtagaaggatatagaattaagacgtaggaatttcgtggtgtttttcgttttttttttttttttagttgtgttttgaaattttaaatgattggaaatttttataatgtttacgtttaagatttttatattatagagtagaggaaggagcgggtgtgtagagggggtgatgttttagattaaaattaaagagttgattgaaaatttaagtttggaattcgagagagttaagaattataagttagtaagttgtaagtatgggtgagattgtttagggaaaggttttttgaaggggcgtttttaatggaatattaatattaagggtaggttaaaggttttttaaagaaaataggaattgggtaggtagagagaagatttttaaagaatgttgttatggaaattagaggaagagaacgatttaaggagcgaatattattggtaaattaatggaagaaatttgttgtattattggttagtattttagttgtagtgttatatgtgatcgttattattgttttgacgtattcgaaagtgatttatttttaaataggtttttttatttgtatagtttttttttttgtagttagttttttttgaaagttttgggtaatggaaatattatagtaaaaagaagaaaaaatggagttttagatttatttttttaaattttagatttattggttgtttttaatttattttatttgttttaggattttatttgttattttagtttttttagtttttttaggatttagttttttttttttttaattataaattttttatttaatagtatttgtaagttaagtgtatttattttatagatgtgtggtattttattgattttaagatatatattttttttttttttttttttttttttttttttttttggacggagtttttgttgtgttatttaggttggagtgtagtggaatgattttagtttattgtaatttttatttttaaggtttaagcgatttttttgttttagtttttcgagtagttaggattataggtatgtagtattatattcggttaattttttgtatttttagtagagatagggttttattatgttggttaggttggttttgaatttttgattttaggtgatttgtttattttagttttttaaagtgtagggattataggtatgagttatcgtgttcggtttttttttatgttttaatattttagaaattagaatgtattttagagtaggtttttaagttataaatggaagttattgtatttttattgttattaggtgttattttttttgttgttatatatgtggaaaatgtgacggggtaggttagagaattttggatttatgtaaattaggtatgtagatgatatattggtaataggattattttagtttataagtagaagttgatttttttgtaagtttgtagtaaaattagttggaggtgatagtatatgtttgtagttttaattatttgggaggttgaggtaggtggatcgtttgagtttaggagttttgggttatagtgtgttatgttagttacgtgtttatattaagtttagtattagtgtggtgatgttttgggagttagggtttattaggttgtttaaggaagggtgaattcgtttaggttaaaaatggagtaagttaaaatttttgtgttgttttgtaatgggattatatttgtgaatagttattgtattttagtttgggtggtatagtgagatttttttaaagtaaatagataaatatttatttattgtgattttttgttatattttttgtttatttatattttaataggattcgttattttgttattggaatttaaaagttttaaaaaatatgtaattatatgtttatattattagtgaaagagagttagtgtttgttttatttattttttgttaaagttattggtttgagtttttattatagtgttttaatttttatttaagattattataaatttatattatttttattagtttagataatgtgagatgttttttgaaataattttttttattaaaattggtttattagagaagtatttttttttataaatatgtgtatttgggggtattgttttgtttaagatagatattttttttttttagttagattatttattttagatgattttagttgaatataaattataaggaattagatattatttttttatgattaatgtgtttttgtttagtatatttttgttttaattagatttaagaaatatgtataattttggttattgtaagttttattttttttgttttttttatttatgttttttttattttatttttttgtgttaaattgtgatttgatagtttttttttttatcgtttatttgtagg

SEQ ID NO: 32 - DNA, 6853 bp, Artificial Sequence
  chemically treated genomic DNA (Homo sapiens)
tttatagataaacggtagaaggaaaggttgttaagttataatttgatatagaagagtggagtggaagaggtatgaataggaagaataaaaagaataagatttataataattaagattatgtatattttttaaatttggttaaagtaaagatgtattaagtaggaatatattgattataagaaaataatgtttaattttttatggtttatgtttagttgagattatttgagatgaatggtttgattagaggagggaaatatttgttttaagtaaaataatatttttaagtatatatatttatgagaaggaatatttttttgatagattaattttaataaagagaattattttagaaaatattttatattatttaagttggtgaaagtgatgtaagtttataatgattttagatgagggttaaaatattatggtaaaaatttaagttaatggttttaatagaaaataaatgaggtagatattaatttttttttattagtgatataaatatataattatatgttttttaaaatttttaagttttagtgataaaatggcgaattttgttaagatgtggataagtagaaagtatgatagaaagttatagtggataggtatttatttatttattttaaaagagttttattgtgttatttaggttggagtgtagtggttatttataggtatgattttattatagagtagtataggagttttgatttgttttatttttgatttgggcgggtttatttttttttaggtaatttggtggattttgatttttaggatattattatattgatgttgaatttaatgtggatacgtgattggtatagtatattatagtttagaatttttggatttaagcgatttatttgttttagttttttaagtagttgggattataggtatgtgttgttatttttagttaattttgttataggtttgtaaagagattagtttttgtttataaattaaaataattttattgttaatatgttatttatatgtttagtttatataaatttagagttttttagtttgtttcgttatattttttatatatgtaatagtaggaagggtggtatttgatagtagtgaaaatataataatttttatttataatttaaaaatttattttaaaatgtattttgatttttaaggtgttaaaatatgaggggaggtcgggtacggtggtttatgtttgtaatttttgtattttgggaggttaaggtgggtagattatttgaggttaggagtttaagattagtttggttaatatggtgaaattttgtttttattaaaaatataaaaaattagtcgagtgtggtgttgtatgtttgtagttttagttattcgggaggttgagataggagaatcgtttgaattttggagatggaggttgtagtgagttgagattattttattgtattttagtttgggtgatatagtaaagatttcgtttaaaaaaaaaaaaaaaaaaaaaaagggagggaaaaaatgtgtattttagagttagtgaaatattatatatttatggaatggatgtatttggtttgtagatgttattgggtgagagatttatagttagaagagggaagagttgggttttggaagaattgggagaattaagatagtaggtgggattttaaaatagatgaagtgggttggaagtagttaatgaatttgaggtttggaaaaatgagtttgaaattttatttttttttttttttattgtaatatttttattatttaagatttttaggaaaaattggttataagaaaaagagttatataaataaaaaaatttatttaagaatgaattattttcgaatacgttaaagtagtaataacgattatatataatattgtagttgggatattaattagtggtgtagtagattttttttattagtttattagtagtattcgttttttaaatcgttttttttttttggtttttatgatagtattttttgggagttttttttttgtttatttagtttttgttttttttagagggtttttggtttgtttttaatattgatattttattagggacgtttttttaaagagtttttttttagataattttatttatatttgtaatttattgatttatagtttttaattttttcgagttttagatttgaatttttaattaattttttagttttaatttgaagtattattttttttgtatattcgtttttttttttattttgtagtatgagagttttaaacgtgaatattataaaagtttttaattatttagaattttaggatataattggaaggggaggaggggcgaagggtattacggagtttttacgttttaattttgtgtttttttgtaggttttttttgcgaagattttaatttttagtttcgagtaggaggtattataatgtttttttgggtgatgattgttatgaaatggaatgatcggggtagaggtatggatattcggagttataggaatttttttgttttgttaaaataaagttatgtagattatgatataatcgatataaattaaatgtatattaggtagagtatcgaggtttgtagaaggtttcgtcgatttttaaggagatagagtatggtttttttatagttttttttataagggagttagaggaaaggatgaagaatttttaagagaatttaagagcgggtaggattgtaaagattttttttttagaattttcgtgggttgaataaagggaggttggggtagtttttttttacgagagataaggttaagaggttcgttcgcgggtttttgcgcggagttaggttcggagcggttcgggcgggcgttttatttttggtaggaagcgcggatacggttgtttttcggggtttcgaggggagggggttgtagggtcgtacgtttgggggttacgttttttttttttgggtttttttaaggagttttaagatcgttttttatttatttgcgttttttgttagcggttattagttttttgtgttggaaggtggattaagatttcgcgttcggcgtcgttatttttcgtttttttcgggtttttcgttgcgtatcgtttatagtttaaataaatcgggggtcgtcgttttttttatatttttttttttagacgcggacgtatattgcgtttgcgttgcgttttgtcgcgtttatatattaggttatttagttttcggttcggtgcgtgcgtaggcgtagagttttagcggcggtcgcgcggtttaatggggtgaagtggggtgttcggcggatagataaaaggaggggaaggagcggggcggggtaaagggcggggaaagagcgagggcgggcgggtgtgtttcgttcggtttgggaattcgattggttatcgattttcgcggaaattatttcggtgtttttcgcgttttttggtcggtttatggcgataattttacggagacgggcgtggttggagttttgttttattgaagttgaacggttggggttaggttgcgaaggagattgagagcgcgataaggttttggatagatgttcgcgcggggaaggaaggttggtttaggagggggcgttagttatggtttagtagtttttagcgatcgaaatttatattatagtcgtagtatataattttaggaaatttggtgtttaatattgggattttaggaattaggatcggcggttggggtgaaagttagcggttagagtttaggagtgaggtagaagttgttagagatttttcgtaagtgatttcggggttatatatggatgatttaagagggagttttttcgttagaaagtttatatgttttattttttttggtttttatattaatttattgttaaaattggaagtttttttatttggggttattgattttattgtttttagataggatggggattttgtattggagattgttttttagtttttgggtaggagaggtatagatattgttacgtacgcggagtagggattattagcgttttgattgattttgttcgtttaggaggttggggatatgcgtgtttatgtttagtttattttttttgtagatataattggtcgtttattttgtttataggaagttttttattttgtattagtagttgtttttagatagggattgggagatatgtaagttgtttggttttttattattttgtgttgaaaatataataggttttgggattaggagtttattttagttattttaatgttatttattagtagtgtgttttcgtgtatattattaaatttttttgatttttggaatttttattttttaataataatttataaagttgttaagtttaagggttttaatagttcgaatagtatttggaatagaagtaatagtcgttatttagaggttatttttttttttttcgttttttttggattatttttttattttatttttaatttaacgttggaaatattggatatggggtaggttattaaatgttgttagaagatttaaattatgttatttatattttagttgggaagggtttatcgtggtttgattttttttagggtttaagtttttatttatgatgtttaggtagaaatatttgtttttgatatatagtaggcgttggaaaatgttagttaaatgaacgaggtttggtgtggagagaagagaaattttgggagagttatttaagggggtgtttagttgtttttataaaaaatattattattattagggtgattaaagtagatattataggtagggggtggagttagaggttttaatgtggggattgtcgttaagttttgtagattaggagtagtggatatagttcgtggttttcgaagtcgaaggttgattggagtttttttagggttttttttttgggttatggatttttttgaggttattcgtttttgttttagtttggtttttttggatttttttggatggttaggttgtttttttttaggtgttgggggtattataatagtgttgtaggggggtggttggtttaatttttgggggcggtattgggattttagttttattacggtttttttatagattggtattttaaaggttttattgtttttgagggaagagaaataaggttattggtggtttttatgaaagaagtttttttttttttttttttgtttgttgtgggtaaaagattttttgttggtttttgattttttttttcgttgatgttaatgataggaaattagagattttttgttttagagattatagggagagagggaggatgggtttaaggtgtattttttttacgatgtttatttttaatttatcgtgtattgtttgagggttttgggtttttagtttgtattgattggagttgggatcgaagtttttattttagaaatcggattaggagataggtaaataagaagaagttatttaatgtgagaaagaaataagtaacgggggtgatgttcgtttttatgtttagtaaagttagttttagtaggaaggaggcgtagtataggaggagaagcggtttttttagtttttttagtaagtgtattggtattatggtttttttttaggtttttgtaaaaagatatatagttattgtgtttatattagtaattggtgttatggttgtgttagatattaaagtaattatatgatatttttttgtttggtttttaggttttttaattttaaataaattatttgtagagttttttttagtttcgaaattttttttatgttttggagtgtgtggaatagttaggaaattagtttaggagttttgatttttagttattttgtaagttgattgtgttatggttttgtttttttttttttttttttttttgtagttttttttttagttttgttttttattattatttaggattcggttttgggtacgttttgtttggggttttagtgtatattggtatttttggaatttaggtgatggggtaggttttgttttttttttgttattgtttttattggatttttatttttatttttttagttagaggtttttaatttagtttcgttagagagaagaggggagggagttttatttattttgtttgattttgtttttttttttttttcggtgttagtttatgttttaggtggagggagaaagtgtatataggcgtattaaagttatagggatataattgtttgagaaataattgtataggtaaaggtttagtataatggtcggaggttttgataatttttgtttttttttagattttatatttgttagggtttttttttattttttgttgattttaatttgttaaatttagtttgtaaattttttgttaggaggtagtttagtggttgggaggcggtgggtaggggaatttttttttttttttgtaatagtaataattcgaggtagtttatattttagaaatagtttgttagaagttgttagcgttttgtgtagtaaggaattgtagattttttttttatatttcggttttaattttatgattttttcgattttcgtatttatatttgttttagaagttcgtcgtttatttgtttttatagattgtagaaagtagatggggtggggggtggtgggaagggtcggagcgggtaggtggagtttattggttttattttttttttttgttttaatttttgttttggtttagttagttttcgttttttttttttttaaggttgatttttaattgttgaattttgatttgttttggtttttattttttttatttatttatgttgtattttaatgagagtgtatttttgatttttaatgatttttgtatttaggatcggagttagtattaatttttttttttcggcgtatattgtatgttaattatagttttgggtagtttgttttttatttgggtaa

SEQ ID NO: 33 - DNA, 18683 bp, Artificial Sequence
  chemically treated genomic DNA (Homo sapiens)
tttttaagtgtcggttagtttgagaaataaagggaaagagtataaaagagagaaattttaaagttgggtgttcggggtagatattatatgtcggtaggttttatgatgttttttgagttataaaattagtaagtttttgttagtgatttttaaaaggggagggagtgtacgaatagggtgtgggttatagagattacgtgttttataaggtagtaaaatattataaggtaaatggaggtagggtgagattatagaattagggtgaaattaaaattgttaatgaagttttgggtacgtattgttattgataatattttattatgagatagggtttgagagtagataattagtttgattaaaatttattaggtgggaatttttttattttaataagtttgggagtattataggagatcggggtttattttattttttatgataatcgtaaaagatagatatttttagagtagttattttagagatttttttttaggaacgtattttgttttttgttgagaaaaagaatttagtaatattttttttatttgtttttgaaagaagagaaatacggttttgtttcgtttagtttttaggtagttagatttaatggttattttttttgttttttgaacgtcgtttttattttgttttttttttaaggtgtttagattttatattgtttaaataatttgtgtagttaacgtaattattatagggttttaaggcgatatatatttttagtttataaagatgatgggatgaagagattaaagtaaagataggtataggaaattataagaatattgattggggaagtgataagtgtttatgaaatttttataatttatgtttagagattgtagtaaagataggtataagaaattataaaagtattaatttggggaattaataagtgtttatgaaatttttataatttatgtttttttgttatggttttagtcggtttttttgttcggggtttttgattttttataatattagagtttatgtgaaatggaagtaaattatttttgtgtatatttatattaagaagaaagagtttaaaggttgaattataaattatagagtttttaggttttattattttttttgtttgttttaaatttattattattttttttttgagataaaaattattttttgtttttgtttttgttagatcgttttttatttttgtattgagtattttaagtattgtagaaaagatgttatttttttttttaaggttgttttgtaatatatataaggattggaattgtgtttttaaagaaaagtatttaagtatgataatatattatttgtgtttttattattaaaagtgttgtttagtagtttaaatttaaattatttaatgttatttaataaagtgattaaaatgtgttttttattgtatttttatagttttgaaaaaataaataatttaattatatatttttaatattttatagtttttttaagaatgtataatagttaataaatataaaagaaatagtagatagagtatgagatgttgaagaaatattatagtgtattgaatgtaaaattatgtatttgtgttgtgtaggggaaatagtttggggttaaattagttatttagtgatgtgaagattttgaagaattggaagaattataaatttagttgtaattatgagttttttttaattttaaatttattaaaagtgaaggcgaatttttgattttttgtaattttttaatgttaagttttatattgttattttattttaatatttttttaagttttggaatatatgtgtaggatgcgtagtttgttatataggtaaacgtgtgttatggtggtttgttgtatagattaatttattatttagttattaagttaagtatgtattattttttttttttaatgtttttttatattttttatttttttatttggtttttatgtgtgttgtttttttttttgagtttatgtgtttttattgtttagtttttatttataagtgagaatatgtagtgtttggttttttgtttttgtattagtttgttgcggataatattttttagttttatttttgtttttgtaaaggatatgattttatttatttttatggttgtattgtattttatggtgtatatgtgttatattttttttatttagtttattattgatgggtattttgattgattttatgtttttgttattgtgaatagtgttgtaatgaatatatgtatgtatgtaatgtatttttataatagaatgatttatatttttttgggtgtatatttagtaatggtattttttggttaaatggtatttttgttttaaatgatttattatatatttttttataattattgatttaatttatatttttattaatagtgttttttgaatatagtatattgatgagttttgtttttttgtttagtttgttattgtgtgttttttaattggggaatttggtttatttattttaaggttaatattggtatgtgtgaatttgattttgttattatgatgttgtttggttaattttgtagatttgttaatgtagttgttttatagtgttatgggtttgtgtattttagtgtgtttttatagtggttgttaatagatttttttttttatgattattgttttttataggatgttttttaaggtaagtttggtggtgataaaattttttagtatttgtttgtttgaaaaggattttattttttttttatttatgaagtttagtttggttagatattaaattttgggttggaaattattttttttattaatgttgaatattggtttttagttttttttggtttgtaggatttttgttgagaattttattgttagtttgatgggtttttttttgtaggtgatttggtttttttttttggttgtttttaatattttttttttttattttaattttggagaatttgatgattatgtgttttgggattgatttttttgtggagtattttattgggattgtttgaattttttgaatttgaatgttgatttgttttgttaggttggggatgtttttttggatgatattttgaagtgtgttttttgatttggttttattttttatattttttttaggtattttaattagttataggtttggtttttttatatagttttatagttttggaaggtattgtttattgttttttatttttttttgtaattttttttatttgttttattttagtaagatagtttttaagttttgatatttttttttttgtttggttgatttggttattgatatttgtgtttgaattatgaaggttttacgttgtgttttttagttttattatgttatttgtatttttttttaaattggttattttaattaatagtttttgtaattttttattacggtttttagtttttttgttttgggttagaatataattttttagtttagtaaagtttgttattatatattttttgatatttatttttgttagtttatttattttagttttagttttgttttgtgtttttgttggagaagtgttgaaattatttgaggagaaaaggtattttagtttttggaatttttagcggttttgcgttggtttttcgttatttttgtggatttatttatttttaatttttaaagttgttgatttttggatgggatttttgtagggttttttttgttgatgttgtgttattgttgttttatttttttttgttttttttttaatatttaggttttttttttgtaggtttgttgtagtgtgttgaggatttattttagatattgtttatttatgtattattaatggaggttgtagaatagtaaagagtgttgttttttttttttttcggaagtttttttttagaggattattgatttgacgtttgttggaatttttttgtatgaggtgtttggtaatttttgttgaatggtttaatttagttaggaggtttaggattaggaatttatttaaggaaagagtttggttattttttagtagagatggtgtattgggttgggggaattttttttgtttggatcgttgatattttttagagttagtaggtaggaaagattaagttggttgaatttgagatcgtagttgttttttttcgtaggtgttttgtattagggaaatgagagttttgtttgtaaattttaggtggagttgttgaaatttttgtaagtattttttgtcgggagaggagggatggatttcggttttatttaaagaagtagtttggttatgatttgttatagcggttgtgttgtattgtgaagattgttgtttagtttaatttgtttagtttttttagtattggtagggaaaaatcgttgattagagttgtagtaatggtagtcgttttttttttggggaattcggttatttttggcgtattttaggttgttatgttggttagtggggattttaatttagcggatttaagtttgtaggtttttgtgagaatggatttgttgtaaggttattttgttttttggttttagttttttttttatgggagtggacgggatttttgttttattagagtttcgggagttgttggattatgtaaaaatttttgtagtttagtgtttgtttaaaaagttggaaatatgaattattgggttaatttttattaggaaatgaaaaagagttgttagattaaatttttttagttattgtcgttttttgtaattagagaaagaaaaattgagagattaggaagagaagagatagatggatagaagaagtttgggtggttataggaaataagaaaagaaataagttgaggtgttaatttataggataatattttgttatttttattttttttttttaagttagaaattaaattttagtaattggatgttaatttgttgatgataaggtattttttgataatgagtttggaattttgagtagtagttttataatttgtaattatacgttttcgttttttgtaataaggaaatatatagtttatttttatttttgattttgaggttttttttaacgttgtaaaaaaggatagaggttgttttttatggtaggtgagtttttttttgattaggagtttgggagtaggaatttagaaaatatttgatttattgttttgaaataaatataagaaaggaagtgagtcgatagtatatatgttgaatttttttttttattgattgtgtgtagtttgaattatgggatttggtgttagagatattgacggaggttatatgttttttagatgtttttgagttagaaagaagttaattttttttttttagtttttggtaattaaagggagggtaaagaaagttagaggaagttatttgtgtgagataattttagaagtttcgaaatgtattttgaaattttttttttgattttaaattaattgtttagattataaatttttttcgtagaattagatttgagagtttttgaattgttatttttttcgatattttttattgtgaattatatttttggtttgtttaaagtgatttaatttttttttttttttcgttggttttgatattgattattttaatataatattttatgggttaatattatagttgttttgttttgtcgttgttattgtttttaattggtatttttttttttaggatttaattttttaatttattttgtatataatttttatggttatttgtcgttatatatagaagttgaaaaagtttaagggatagagttatttaggtagttagtattttagtaggttataacgtttttttggttttattttttttataggaaaaggaagaaattggattagattagtgaattttaaattttataatatatcgtagtaatttgtagttatataaaaaaagttagatgattatttttttttttatcgcgaatagtttaattttaaatattttgtaggtatttattatttttgaagatcgttatataatttttatgaaattgatttgatataggtttgttttattaggaaagttgattagttagttaatattttttgtttatttgttagtgatttattaatgtaattaattttgtttagggatatatagtggttttttattgtttttttttttttttattatttgaatttttagataattttttttattttttgaaatatgtgtatttagtttttttattaatttttgtaaagtatgattttaattttataaaaaaatattgtatttattttatttatattattttgttgttgtttttttatttttttgattttttttatagaataatttttttcggggtttatgtttaattttataatatttaatttaagttttggaattaagggattattagataaagatagggtaaattgaaagttattagttaaaaataagtcgtggtttgataattataaataattaaatgtagatagttattattattttaaatttttgaggaattgtattttgtaatgtgtttaagtattatattattttgtttggaattaaaattgtggttttgataagtttttttttttaattgatttttgttatttttattattattgtagtttttatttagtgattattataataataaaaaataatttatagtaattatttttttaaaaaatatttattatatgatagttaatttatgtattttttttgatttaatatttaatattaattaatatagttgtgttattatttttatattgtagttgaaggggatatttagagaatgtttttaaaatatgttttaggttaaaagtttgttgagaggagtggttttaggttggtatgatttttaaattttgttattaatttaattttttgtaaatatttttaaatatttgttttgtttttgattattgttattttagttttggttttatatttttattttttttaaagtttagtttttttagttttttggttatacgagatatttttaagtttttgtgtttttttttttattgttttttgttaaaagattagtttttagttttttaggggataaatttttattagttttttaggttttagtgttaagtttttttttttttggatagttgtatttgagatatattttgtttatgttttttttgagtttttgttaattatttatatttttataatattttttattttatttatttgtatatgtatttttttatttgattgtaaattttaaagtgtatagatatgttgttaaagtggtatttttaataatagtagagtaagttttaagaatttatgtttattaaatatatttgaatggataggggaatgaatatgttttttttttgttgaaatatttaatatgtaattattatttattaaatgaaattaaatttatttggtttgttattaagaatttgtaattattaggtgggtttattttgtttattgtttagatagagttaatttattaagataggggaattgtaatggcgtaagagtaatttacgtagattcggttgttttggagagggtagtgttattattatttaaattagttttttcgagtatttagaaataagaacgtttaaagataatttggtagttaggggtttgggaagtaggaagtgttgattatttaggtgggagatggaattatagggtgttaaagtgaggtttttttgttgtgttttttttttgggtgtgatggtagaattggttgggttagattattggtttgggtggtgttagttgatttattgagtgtagcgtttgaaaaatattttaagtgttgatattagattttataaagtgatattatttttgggagtataatggggatattttaattttaggagttagaggttgtatgttttttatattgtaatttttagttttgtagttaatttgttagttttgtaaagggagattggattttaggtaagaagagggttttttcgagaaaaggttgttatcggttttgttttagttaaattatgaattgaatttttttttaaagttagttcggtttatgtttaggaatgaataagaatagtttaagggatagaagtaagatagagttggttaggttttattttttttattgtcgtaattattttagttataatattgtaaaggtagttttaatttttttgtttgggttttttaatagtttaattttaaggtgtaggttatgaagatgggaaaaggttgtcgattattttggtttttttttgttgataggagatatagtggaaattagagtgaattttaaggtgagaagaatgtaattattttgtaattgtttgagtatatttatgtaggattggttgggtttttaatgtttgtaatgtaaaaatattagtatttttttttgtagttttgttataatatttaagttaatagttttttgtaaggtaaataataaattttaggatgaggagtataatttttaattttaaaagtaaaaattggaaagtattaatttggggatttttaatttataaagaatttaggatttagtttaaattgtaggaaaaaatttaaataaaattaataatgggtatattatatgtttttttttgaagtataatttttttttttagattttatttttattaaaagtaaattataatagaattaatttgtttattaaaataagttttagttttattgtatttggtttgattatttgtatgaagtgtaataagaataattattttttatttaggttgttttttgtttaaattggttttgatggaattttgttttatgaggaattttagataagattttttaagagttaattttagttatgtatttgtatttttaaatatttatgagttgggtaaatttttttttttttaaggttttaagataatttggagtttatgaatttgttagaaagtgatattttttatttattatagattaagaattttgtataaggattttgtgtagataaggtatgaagttagattttttaaggggtttttattggttttgtaagttaatttcgattttttaagggaagagtgttattttagttaaagttttggtaaaataattaatttttttaattgtgttatgttataaaagaaaatagatttttattgtgtttatggaattaattatgttgttataaattgagaatatttataaagagtttttaaattttggagaaattaggtagagagaaataaatatgttttaaaatttttttataggagtgtattttatttatttgttaaaagttgtaaatatttttaaagaaataagttattttgattgtgaaaattgaaggattggtgatatttaagatattagttttttatgagagttttggaagttttgttttttttttttattttaatagtataatttttaaagttatttgagatttgtatttagagttttatatttgattataaattgttttttgaaaacgattaaagtaagataaaatgtttgtggatgataaaagtttatagatattattaaagttataattgattaggaattttgtttatttttgtggtatttaataattttgtataataattataattattaataatgtatagtaaattttattagaattatagaagtttatataaatatatagatagatagaaaatttagtatttgtaagattttttatttgttagttgttaattggattattggttttagagtggagtttttggaggaatagggttaggaaagtatgtattttttttttaagttaaataagtaggtatagttgaaggtaaagatagatttttaaaatgaaggatgttattttatattggattttagatttttaaaaggaaggaaatattattggagaagagagtgtagtgtttttaatttgtattttattgtaaggtaatttaaagttaattaatttattttgaaattagtttattttttatggaagttttattttttagttaggtatggggatgttttcgtatttttttggtggtttagagtatgtttttttgatttaagtgtgcgaagagttaagtttttttttgaaaatattattagttattttttaaagtatattttttatttagttattatatattaaagttattttataatgtaaagtaatttttgatatttttaaaatttaaattgttagataatataatgtaaaatagaatagagtttttgattttgagagtgatttatttatttttaattttttggttgttatgaagaaaatagagggttttttgtttgttttttgttgtttgttttttttaaaatggggtttgtggtgttttttttgttttttttaaggagttttaggttattaaaagttattttagtgttttttatgtgtgtattaagagtggtaagataaaaaatggagaaaaataatttagtttattaagaagaaaaaatttttttttatagaaaaacgagatttaagaagagaaaaatataaaggttttttaaatgtatttataatttgtttatttatttttaattaagttgatttttaattttagtgtttttaataaaatttttttaaatttcgtattatttaattttagttatgcggttaatatttttggtttttgaattttattaaaagtaattttttaggtgttttaaaggtgtggtaagtagtttttttttataagatttagaatttttttaaggtagtttagagaaaggaaaatttaagagaggaaattagaagttatttatggggttgtgggggaattttattaaatggtaaagttatgtaaatagtaaattagaaggaaatcgttttagaagttaagaatagagtttgagtttttatgttaaaaggtaaagttttagttattgaattatagtattgagtagtttttattgttattttaagaaggagattagagaagttatttttaattttgttaaggtttttaattgtttaagaaaaatttttagggttggatggtataaattaaaaggaagtatttatatatggttataagattaagtttttaaggaggttaaataagatagagaaattttatatagtattggttttagggatttattataattggttagtttgttgagttggtttgaaaagtaggtttataggggttttaaatttatgttttattttgtgatatttttttttttattatagaatattgaaagataaatttttagtaaaaatatattagatttgttataggttaagattagttttgtaaatttttttttttattaattaaaattttatagagaaatatatagtgatgtttattgtttatatagatggagaaagagagagagattagaaatttagttggtaagaattttttatattttttgttggtatattagatttttgggtgttttttttttgtaatttttagaagaacggaacggtttttgattagtttgtttattttattatagttgtggggtttaagttattttataagaaaaaagttattattttttgttttatggaaatataggtaagatttttaaaatgtaagatgttgtttaattagttgtatggggaattatttaatattttttattttagtagaatttatataataaaatagatattagttatttcgtttagtatttaatattaatttggtaaagtttagatttttttttgttcgtttttgttgtttttgatttattttaggtggggagggacgattttagaatagtaatttataatggggtttttgggtaaggtaaagagtagatagttattatgagataggtttattgaattttttttagggtttatcgaatgtaattaaataagaagagttttttgagttaggtttgttggattttttttagtaattttttttgagattttttttatatatataaatatatacgaagatgagatagatagaaggttttttaaattagatgatttttaaataggaattttaagagtattttttttaaattatttttttattttttgtttgagaaattttaaaattgttttgattgaggataagttttttgaattaagattttttttattagttagagttaattaagattttagtggagtcgaatagatatttcgtggtggagttataaatagatattttgtaatggggttatagatattttgtaatggggttatagatattttattatagagttatagataagtcgagagaaggaaggaggtattagtagtgtttagtagatttattaattttaatattttgtaatggggttatagatagatattttattatggggttatagaattagttaggagaaggaaggaggtattggtagtatttaggatatttattaatttagatattttttaatgtagttatagacggaaattttgtgatagggttatagttagaggatatttttttaggattattttttcgttgtaattaaatgtatgtatattgggttggtagtgtttgttagtggagagagtattagagttagtttttagtttaagagaattaggcggttatttgggttagtttttggatttatcgttggagcgggggtattaaattataagtaggtagttataaaggtttttttagtttgatttcgtttattgttgtaatttttttagttataattttgtaaaggtggttttatattttttaagagttgagttatatataagttttatttatttgtttttatatggatttgattattgatttagtaaataattagtaaatatttagtaaataattagtaaaaagaatgttaaaaatagtgtagatgtagtttatggtttttgtttttatagagtataaattttaatagtggatagagataagtaggttgggaattataattaaatggaaaaataaaaaaaaaggttggatgtggtggtttaggtttgtaatttaatagtagtaatttgggagattaagatgggtggattatttgaggttaggagttcgagattagtttggttaatatggtgaatttttatttttattaaaaatataaaaattagttaggcgtggttgtgtgtatttgtagttttagttatttagaaggttgaggtaggagaatcgtttgaattcgggaggtagagattgtagtgagttaagatagtattattgtattttagtttgggtgatagagtgagattttgttttataaaaatatataaatatataaataaataaatggaaaaaaaatgttattttaaggagatataaggtgttttaggagtatatatttttgatgttgttttttttggaagaattagagaggatttttttaagaaaatattatttaatttgatatttgaaggatagatagatagatagatagatagagaatagtttaaaaattagaagaaattagaagcgggggtgttgaaattatatagatttttaagtagagatttgattttttgagaaaggtgttatttaatttgagatttgaaggttagatagatagtagtaggaaaataagaatgaatgagaaggtaggggttggaaatatagagatttttaaatagaatttttttagaaattaaatgaaggtagaacgttttgaatgtaatgagtaaggtgggaatagtattagaaaatgagtgaatgagaaggtttagattagaataggttgaaagtttttatggttaaatttagatattggaatatttttcgttgtaaagagtagaatagagggacggagagtagattgataaagtttttatgaatttattttttaagaaagaaaggatgttggttcgaatagaagtaatgaataattagaattgagagaagtggttagattttgaaaatgtttagtaaataaaatcgatgtaatgtgaattaagaagggaaataagatatagagaaggttaaagaggttgaatattattaggtattgttgtttttttgtatttggagtataggtattatttattagtatatggaaaagagaatgaaggatggaaatgaaaaaatgaatagtttatttttgtaagttgagttaaatgaggttgtgagatgtagttgagatattttattgtttattgaatgtataggttttaatatcgatatttatatttgggttgaatttataaatttgagaatgatttatttatttttttaagtatataatggatgttattagaatgtgtagattatattttaggttatatttttaatttatttatttatttatttgataaataaatattgtatatattttttatgtataattttttgtttttatgagtttaatttgtttagagtttatgtataagtgagataatgtgatattttgtgttttggtgtttggtttggtttattttatttaatataatgttttttatgtttattaatattgttagaaacgataggatttatttttatttaaaagttgaatagtgttgtattttgtatataatttatattttttttatttattaatttgtttatagatatttaggttgattttatattttggttattgtgaataatgttgtaatggaaatagaagtttagatattttttcgagatattgattttttaatttttgatatatatttaatagtgggattgtttgattatatttttagttttatttttaatttttagaggtgtttttatataggtttttataaagattatgttaatttatttttttttttttttttttttttttgggaaaaaaattttttttttgggggttcgggggggggggtatttttttttaattttaaaggggtttttaaaaaaggtttttaaaaaaatttttttaattttttttttttttttttttttttttttttgagatagagttttattttgttgtttaggttggagggtagttatggaatttaggtttattgtaattttcgtttttagggttttagtaattttattgtttttgttttatgagtagttaagattataggcgtttattattacgttcggttaatttttgtatttttattagaagtagggttttattatgttgtttagtttggtttagaattattgattttaggtgatttgttcgttttaattttataaagtgttgggattatagtcgtgagttattgcgtagggtttaatttacgttttattaatagtgtataagagtttttttttttttatattttttttattatttgttattttttgtttttttggtaatagttattttaataggtgtaaagtgatattttattgtgattttaatttttttggtggttagagaggttgattattttttatatatatattttttgtatgtttttttttgaaaagtgtttattttggttttttgtttatttttaaattagtttattttttttttattgaattgtttgtgttttttgtattttgtatattaattttttattagatgtatggtttgtaaattttttttattatattgttgattatttttttaattttttgattgtttttttgattgtgtaaaagttttttagtttgatgtaattttatttgtatattttagtttttgttttttgtttttttttgttatatttaaaaattattgtttagattaatgttatgaagttgtttttttttgtttttttttagtagttttatagttttggtttttatatttatatatttaatttattttgagtttatttttgtatatgtttagagatttttatttttttgtatgtggttttataatttttttaatattatttattgaagaatttgtttttttttagttgtgtgtttatgaaatttttgttgaaaagttaaattaatgtaaataattgggtttatttttgggttttttgttttgtttatttgttttttgtttttatttttatgtaattattgtgttattttgatgattgtagtattttgtagtttattttgaatttagatagtgcgatgtttgtagttttgttttttttatttaaaattgttttgtttatttagggtttgtttttttttgtgtgattttatataaattttaggatttgtttttatttttgtaaaagttgttattagaattttgataggaattgtattgtatttttagatttttttgggtattagggatattttaataatagtaattttttagtttattaatttaaaatatatttttatttatttttgttttttttagttttttttattaatattttatagttttgagatttgttattattgttgatatttttgagataggattttattttgtagttaagattggagtatagtgttataattatagtttattataattttaaatttttgggtttaagtaatttttttattttagatttttaagaagtaaggattatagatatatgttattatggttagttaattttttaaattttttgtagagatatagttttattatgttgattgggttgaagttttatatttttacgtgtatttgttttttatttattcggttaaattgatttttaagtatttttgtagtaattttaaatggaaatttatttattttttaaagatggtttattgttatatagaaatattatagatttttgtatgttgattttttttattttgtaatttttttgaatttgtttatttgttttaaaagatttttggtggattttttagggtttttcgtatataagattattttatttttaaataggtataattaaatttttttttttttaattttgatgttttttatttttttttgttggcgaattgttttggttagaattacgttgaatggaagtggtaaatgtgaatatttttgttttttttttgattttagagaaagggtttttaattttttattattgagtatgatgttagttgtgtgtttgttatatgtgattttttttgttaaaaattttttaattttattgtttattatatttttttatatattatttatttagttaatattatattagtttattgagtatataaataaataaaatagaagtttagaatttaggtagtttggatattttatatattaatttgtgtattgtttgtaaattatattgtgttgtaatatttgtatttgatgttgtaagattaatatttttgttatttttttttagaagtttttgtgattttatttgttggaatgtattaatgttttttgagttttttaaatattttgtttatatttttttaagaagttttttattaattgttaggtaatgtagtttgatgaattaagaatgggggttttggattttgaatttttagattttaatttttgtttttagttattatatattcggtgtttttttatattatttgagttaattatttattattttttattttttatataagagaggttaatatatgttttatatggaatttttgtgaaattttagtaatgtatttggtatgatgagggtttaatgaatattaattattttaattgaattatattatgattaattatatagattatggtgaaaaaaataagatttgaattttaatttatgtgatgtgatataagttattatttaaatggtgaatataaaatagggaatataataattattttattggtttattgtgagggtttagtatattaatatttgtaaaatttttggtatagtgatatgtaaatgataatgatgattataataatgatttaaattgttttatatgtatttattttttatttataataagtatatgggagatattattttttattaagttaatttatattatgtaattttttttttggtttgtaatgtttaatgttttttttataatagttgtttaataagtacgtatgaaaatattaatttaagataatttagataatgaggttggtgtttttgtgttaaagtttttgtgtaatgttttgatatgatttttttagatgttattttgtgttagtattatttttatatttatatggattgtataattatttttgtagtattgattgagaattgataagatatttagtatttttgtgtataatttgtcgaaattatatttgttgtattgaaataaaggatgtattattttggtatttatatttttttataaatatttaaattattttaaggagtaatatattaatatggtgttaaattaaattaatttattatattggaagattaggaattaggttatttttaattttaaatttttattgagaataagatttgaaagaattataaatatggatgtatttatttatttattttttatgtatttagtaagtatattaagtatttttaaatattttgaatataaagatgtgggtataggatgtaagttaaaaaaatgtaaatttaaagatatagtttttttattaagaaaattaaatatagaaaagagtaaaaattatataggaagtaaaaatttagtaggaagaatttatattttagataagagtattgattttttcgggaatatatattttaggtagattattattattatgggtcgtgaattagtaaaagagaaaaatgaatatagtggatgattaggaagtttgtattaggtttaatgttatagaaggaagttgagaagttaaaagaaaagaaaagaaaaaagaataaaaaagaaaataaaaagtatttagtggtaataaattgttaaataatttggtaggaatatgatgaatgatagaattttataggtataagaagatagatggtgaagtaggatatatttttagaagtattttatattatagaattatatttaaagtgagggtgaaattttttaagttgtgtttatagttaaaggaatttttttatttttaata

SEQ ID NO: 34 - DNA, 18683 bp, Artificial Sequence
  chemically treated genomic DNA (Homo sapiens)
tgttagaaatagaaagatttttttaattatgggtatagtttaaagagttttatttttattttagatatagttttataatgtgaaatatttttgaaagtatgttttattttattatttgtttttttgtatttatagagttttgttatttattatatttttattaggttgtttaataatttattgttattaaatattttttatttttttttttgttttttttttttttttttttttttagttttttaatttttttttgtggtattggatttaatgtaaattttttggttatttattgtatttattttttttttttattggtttacggtttatagtgataatgatttgtttaaaatatatattttcgggaaagttaatgtttttgtttagaatataaattttttttattagatttttattttttatatgatttttatttttttttgtatttagtttttttggtgaaagaattatatttttgaatttgtatttttttaatttatattttatatttatatttttgtatttaaaatgtttaaaagtatttaatatgtttgttaaatatataaagaataaatggatgagtgtatttatatttataatttttttaaattttgtttttaatgaaaatttaaaattgaaagtaatttgatttttaattttttagtgtggtggattagtttaatttgatattatgttaatgtattattttttagagtaatttgaatatttataaggaaatatagatattaaagtaatatattttttgttttaatataatagatatgatttcggtagattgtatatagaaatgttggatattttattaatttttaattaatgttataaagataattatataatttatgtaggtgtaaggatagtgttgatataaaatgatatttaaagaaattatgttaggatattgtataaaagttttggtatagaagtattagttttattgtttgggttattttgaattaatatttttatacgtgtttattgggtagttattatgagaaaaatattagatattataaattaggaaaaaagttatataatataaattaatttagtaaagggtaatattttttatgtatttattataaataaaaaatgaatgtatataaaataatttaaattattattataattattattattatttatatattattgtattaaaggttttataaatgttaatatattggatttttataataagttagtggggtagttattatattttttattttatatttattatttaaataataatttatgttatattatatgaattaggatttaaattttgttttttttattatagtttatatagttaattatgatatggtttagttaaaatagttaatatttattgagtttttattatgttaagtgtattattgaaattttataaaaattttatataaaatatatattaattttttttatatggaaaatggaagataataagtaattgatttaaataatgtaaaagaatatcgagtatatagtaattgggaataagaattgaaatttaggggtttagaatttagagtttttatttttaatttattaaattatattatttgatagttggtgaagagttttttaaaagaatgtagataagatatttaaggggtttagaaaatattagtgtattttaataggtgagattataaaggtttttgagaagaggtagtaaaaatgttagttttgtaatattaggtatagatgttgtaatatagtgtgatttgtaaatagtatatagattagtgtgtgggatatttaaattatttgagttttgggtttttgttttatttatttgtgtgtttagtaaattaatatagtgttgattgaataaatgatatgtgaagaaatataataagtaataaaattgaagagtttttaataaaaaaagttatatatgataaatatatagttaatattatatttaatggtgaaaagttgaaaattttttttttaagattaggaagaagataaagatatttatatttattatttttatttaacgtagttttgattagagtaattcgttaataaaaagaaataaaaggtattaaaattggaaaggaagaagtttaattgtgtttgtttaaagatgaaatggttttatatacggaaaattttaaaggatttattaaaaattttttagaataaataaatagatttaagaaaattgtaggataaaaaaaattaatatataaaaatttgtagtgtttttgtataataataaattatttttaaaaaataaataaatttttatttaaaattgttgtaaaaatatttagaaattaatttaatcgagtaggtaaaaaataagtatacgtaaaagtataaaattttaatttaattaatatggtgagattatgtttttataagaaatttaaaaagttggttggttatagtagtatgtgtttatagtttttgttttttggaagtttgaggtaggaggattgtttaagtttaggaatttgagattatagtgagttataattgtgatattatattttagttttggttatagaatgagattttgttttaaaaatattagtaataataataaattttaaaattataaaatattgatagggaaaattgaagaagataaaaataagtagaaatgtattttgagttgatggattggaaaattattattattaaaatgtttttaatatttaaagaaatttaaagatataatgtaatttttattaaaattttaatggtagtttttataaaaatagaaataaattttaaaatttatatggaattatataaaaaaaaataaattttgaataggtaaagtaattttgagtaaagggaataaagttgtaggtatcgtattatttgagtttaaaatagattataaagtattatagttattaaaatagtataatagttgtataaaaatagaaatagagagtaaatgaataggatagaaaatttagaaataaatttaattatttatattaatttgattttttaataaaggttttatgaatatataattgggaaagaataaattttttaataaatgatattgggaaaattgtaaaattatatgtagaagaataaaaatttttaaatatatataaaaataaatttaaaatgagttaaatatgtaaatgtaagaattaaaattgtgaaattattagaagaaaatagaggggaatagttttataatattggtttagataatgatttttggatatgatagaaaaggataggaaataaaagttaaaatatgtaaatgaaattatattaaattaaaaagtttttatatagttaaagaaataattaaaagattaaagagataattaatagtatggtagagaagatttgtaaattatatatttgataaagaattaatatgtaaaatataaagaatataaataatttaatagaaggaaaataaattgatttagaaataagtaaaggattagaataaatattttttaaaagaagatatatagagaatatgtatatgaaaaatgattaatttttttagttattagggaaattgaagttataatgaaatattattttgtatttgttggaatggttattattaaaaagataaaagataataaatggtggagaggatgtagaaaaaaagaaatttttgtatattgttggtaaaacgtaaattaggttttgcgtagtggtttacgattgtaattttagtattttgtgaggttaaggcgggtagattatttgaggttagtagttttagattaggttggataatatggtaaaattttgtttttagtaaaaatataaaaattagtcgagcgtggtggtgggcgtttgtaattttagttatttatgaggtagaggtagtagaattgttggaattttagaggcggaggttgtagtgagtttagattttatgattgttttttagtttaggtaatagagtgagattttgttttaaaaaaaaaaaaaaaaaaaaaaaaaaaaaattaagggggtttttttggaaattttttttggaaatttttttaaaattaaaaaaaaatgttttttttttcgggtttttaaggggggaattttttttttaaaaaaaaaaaaaaaaaaaaaagagtaaattagtatggtttttatggaaatttatatggagatatttttgaaagttaaaaatagagttaaagatatgattaagtaattttattattaagtatatattaaaaattggaaaattagtgtttcgaggagatatttgaatttttatttttattgtagtattatttataatagttaagatataaaattaatttaaatgtttgtggatagattaatagatgaagaaaatgtggattatatataaaatgtaatattatttagtttttaaatggaagtaaattttatcgtttttgataatattgatgaatatgaagaatattatattaagtaaaataagttaggttaggtattaaaatataaaatattatattattttatttatatatagattttaaataggttaaatttataaaagtagaaggttgtatatagaaaatatgtataatgtttatttgttaaataaataaataagtaaattaaaagtatggtttgaggtataatttatatattttgatggtatttattatatgtttaaaagaataaataaattatttttaaatttatggatttagtttagatgtggatgtcggtattgaaatttatatatttaatagataatgagatattttaattatattttataattttatttaatttaatttataaagatgaattgtttatttttttatttttattttttatttttttttttatatattagtaaataatatttatattttaagtataaaagagtagtaatatttggtgatatttaatttttttggttttttttatgttttatttttttttttaatttatattgtatcgattttatttgttaaatatttttagaatttgattattttttttaattttaattgtttattatttttattcgggttaatatttttttttttttaagaaataaatttataagaattttattaatttatttttcgtttttttattttattttttgtaacgaagagtgttttaatatttagatttgattatgaaaatttttagtttattttaatttaggtttttttatttatttattttttgatattgtttttattttgtttattatatttaaaacgttttgtttttatttaatttttagaaagattttatttaggggtttttgtatttttagtttttatttttttatttatttttgtttttttattgttgtttgtttaatttttaagttttagattagatggtattttttttagggaattaagtttttatttagggatttgtatagttttagtattttcgtttttaattttttttggtttttgaattgttttttgtttatttgtttatttgtttattttttaagtattagattagatggtatttttttaagggaattttttttgatttttttagaggagatagtattagagatatatgtttttagggtattttgtatttttttagagtagtattttttttttatttatttatttatgtatttatatatttttgtgagatagagttttattttgttatttaggttgaagtgtagtggtgttattttggtttattgtaatttttgtttttcggatttaagcgatttttttgttttagttttttgagtagttaggattataggtgtatataattacgtttggttaatttttgtatttttagtagagatggggatttattatgttggttaggttgatttcgaatttttgattttaggtgatttatttattttggttttttaaattgttgttattggattataggtttgagttattatatttagtttttttttttatttttttatttaattgtgatttttagtttatttatttttatttattgttagaatttatgttttgtgaggataggggttatgaattatatttgtattatttttggtattttttttattagttatttattgaatatttattaattatttattgaattagtagttaagtttatgtaggaataaatgaataaaatttatgtgtggtttaatttttaaggaatatgaaattatttttgtaaaattataattgaggaaattataataatgaacgaaattagattgggaaagtttttgtggttatttgtttgtggtttggtgttttcgttttagcgatggatttagaagttagtttaagtagtcgtttagtttttttggattgggggttggttttggtattttttttattggtaggtattgttaatttaatgtgtatgtatttaattgtaacggagaaataattttggagagatgttttttaattgtggttttattatagggttttcgtttgtagttgtattgaagggtgtttggattggtgagtattttaggtgttgttaatgttttttttttttttttgattggttttgtggttttatagtggggtgtttgtttgtagttttattgtagggtgttaggattggtgaatttattaggtattgttaatgtttttttttttttttcgatttgtttgtagttttatgatggggtgtttgtagttttattgtagggtgtttgtagttttattgtagggtgtttgtttgtagttttattacggggtatttgttcggttttattggggttttggttggttttaattagtaggaagagttttggtttaggagatttgtttttaattaggataattttgagattttttagatagagaataggaggatagtttggaagggatatttttggagtttttgtttagggattatttgatttggaaggttttttgtttgttttattttcgtgtgtgtttgtatatgtggagggaattttagaaggaattgttgaaggaagtttagtaggtttaatttagaggattttttttatttggttatattcgatgagttttggagaaagtttaataggtttgttttatggtgattatttgttttttgttttatttagagattttattgtgaattattgttttgaggtcgtttttttttatttggagtggattaaagataatagggacgaatagaaaaaagtttgagttttgttaggttgatattgggtgttgaacgaggtgattagtgtttgttttgttatgtgaattttgttgggatagaaaatgttaaatggttttttatgtagttggttgggtagtattttgtattttaagaattttgtttatgtttttataaaatagaaaatggtgattttttttttgtaaagtggtttgaattttataattatggtgaggtgagtaggttgattagaagtcgtttcgtttttttggaagttatagagaaaaggtatttagaaatttggtatgttagtaaaaagtgtaagaaatttttattagttaggtttttggtttttttttttttttttatttgtgtaaatagtaaatattattatatgtttttttgtaaagttttgattaatagaaaaaagaatttataagattagttttagtttatagtaaatttggtgtatttttgttaagaatttgttttttagtgttttgtaatggaaagaggggtattataagatagaatatgggtttaggatttttataagtttgttttttaagttagtttagtaggttggttaattataatgggtttttgaaattaatattgtatgaaatttttttgttttgtttggtttttttaagagtttaattttgtgattatatgtggatatttttttttggtttatattatttagttttaaaaattttttttgagtagttaaaagttttggtaaggttaaaagtggtttttttagttttttttttggaatagtaatagaaattgtttaatgttgtaatttagtagttaagattttgttttttgatatagaggtttaggttttatttttggtttttggaacgatttttttttggtttgttatttgtataattttgttatttaatgaggtttttttataattttatggatagtttttgatttttttttttgaatttttttttttttggattattttggggaaattttaaattttgtaaaaagaaattgtttattatatttttgaaatatttgggaagttatttttgataaagtttaaaagttagaaatgttggtcgtatggttaaagttgggtaatacgaaatttaaaaggattttgttaagagtattaaggttaaaagttagtttaattaaaagtgaataaataagttatggatatatttaaaagatttttatgtttttttttttttggatttcgtttttttgtaaaagagggttttttttttttagtaaattgaattatttttttttattttttgttttgttatttttaatgtatatataagaggtattaagataatttttggtagtttgagattttttgagaaaaatagaggaagtattatagattttattttgggaaaaataaataataagaaataaataaaaaattttttgttttttttatgataattaaggaattaaaagtagatggattatttttaaaattaaaggttttgttttgttttgtattgtgttatttgatagtttgaattttggggatattagaaattattttgtattatgagatagttttggtatgtaataattaggtaggaaatatattttaagggatggttaatagtatttttagagggaaatttggtttttcgtatatttgggttagagaagtatgttttgggttattaggaagatacggaaatatttttatgtttgattgagagatgagatttttatgggggatgggttgattttaaaatgggttgattggttttaggttgttttgtaataaaatgtaggttagaagtattgtatttttttttttagtagtatttttttttttttggggatttgggatttagtataaaatggtattttttattttggagatttgtttttgtttttagttgtgtttgtttatttagtttggaaaaaaaatgtatgtttttttggttttgtttttttaagggttttattttgaagttagtagtttagttaataattggtaaataaaaaattttataagtgttgaattttttgtttgtttgtgtatttatataaatttttataattttgataaaatttattgtatattattagtaattataattgttatataaaattgttggatgttatagaagtaagtaaaatttttagttaattatagttttaatagtgtttatagatttttgttatttatagatattttgttttgttttggtcgtttttaaaaggtagtttataattaggtataggattttgagtgtaggttttagataattttaaaaattgtgttattggaatagaggaaaaaaataaaatttttaggatttttatgaagagttgatgttttaaatgttattaattttttagtttttatagttaagataatttatttttttagagatatttgtaatttttaataagtaggtaaaatatatttttgtgaaaaaattttgaagtatatttgtttttttttatttgatttttttagaatttggaaattttttgtaagtatttttaatttatggtagtatggttaattttataagtataataaaaatttgtttttttttgtaatatgatataattggagaaattggttattttattaaggttttgattggaatggtattttttttttaaagaatcgaagttgatttatagagttaataaaagttttttggggaatttggttttatattttgtttatatagagtttttgtataaggtttttgatttgtagtaagtaaagaatattattttttaataggtttatgagttttaagttattttgggattttgagaggagaggaatttatttaatttataggtatttaagggtataaatgtatggttgggattggtttttaaaaagttttatttgagattttttatggaatagagttttattaaagttaatttaaataaaaaatagtttaaataaaaaataattatttttgttgtattttatgtaaataattaggttaagtatagtaagattaaagtttattttggtaaatagattagttttattataatttatttttaataaaaatagggtttggagagaaaaattatgttttaaaagaaaatatataatatatttattgttagttttgtttgagtttttttttatagtttggattaaattttaaattttttgtggattagaagtttttaaattaatgttttttaatttttgtttttaaaattgagaattgtattttttattttaggatttgttatttattttataggaggttgttggtttaaatattatagtaaaattatagaggagagtattaatgtttttgtattgtaagtattggaagtttagttagttttgtatgagtatgtttagatagttgtaaagtggttatattttttttattttggggtttattttaatttttattatgttttttgttagtaggaagaagttagagtgatcgatagtttttttttatttttatagtttatattttaagattaagttattagaaaatttaaatagagggattgaaattgtttttgtaatattataattgaggtaattacgatagtgaaagaaataagatttaattaattttattttgtttttattttttaagttgtttttatttatttttgggtataggtcgaattgattttgggaaggaatttagtttatggtttgattgaaataaaatcggtaatagttttttttcgaaaagattttttttttgtttggggtttagtttttttttgtaggattaataaattagttataagattaaaaattataatgtaagggatatgtagtttttggtttttagaattggaatgtttttattgtgtttttagggataatattattttataaaatttaatattagtatttaagatattttttagacgttgtatttaatggattagttgatattatttaaattagtaatttaatttaattagttttgttattatatttaggaagagaatatagtaagaaaattttattttgatattttatgattttattttttatttgagtaattagtattttttattttttaagtttttagttgttaaattatttttaaacgtttttatttttgaatgttcggggagattgatttaagtaataataatattattttttttagaatagtcggatttgcgtgaattatttttacgttattgtaatttttttgttttgataaattggttttgtttaagtagtgggtaaggtgaatttatttggtgattataaatttttaatagtaaattaggtaagtttgattttatttaatagatgatagttgtatgttggatattttaatagaaggaaggtatgtttatttttttatttatttaggtatatttaatgagtataaatttttgaaatttattttgttgttattgggggtattattttggtagtatgtttgtatattttgaagtttgtagttaagtggaaaaatatatatgtaaataagtaaaatgaaaaatattataagaatgtaaataattagtagaagtttaagaaaagtataagtaaagtgtgttttaggtatagttgtttagagaagggagggtttggtattgagatttgaaggattggtaggaatttgttttttggaaaattaggagttggttttttggtagagagtagtaaggaaaaaagtataaaggtttgagggtgtttcgtgtaattagaaaattgggagagttgggttttagaaggaatagaaatgtgaggttaggattgaagtggtagtgattagagatagggtaagtatttgaagatgtttgtagaaagttagattaatggtagagtttgagagttatgttaatttgagattattttttttaatagatttttgatttaaagtatattttggaggtattttttaagtattttttttaattataatatggaaataatagtataattgtattgattgatgttaaatattaaattagagagagtgtatgaattagttattatatggtaagtattttttaaagaaatggttattatagattattttttgttattataataattattgaatgaaagttgtagtgataataaaaatggtaggaattaattagaggaaaaaatttattaggattatagttttggttttaggtaaagtgatgtaatgtttaaatatattataggatataattttttaagagtttaaggtaataatagttgtttatatttggttgtttataattattaaattacgatttgtttttgattagtggtttttaatttattttatttttatttaatgattttttgattttagagtttaagttaaatgttgtgaagttagatataaatttcggagagaattgttttatagggagaattaaaggagtaaagaaataataataaggtaatatgagtgaagtaaatatagtatttttttatgaagttgaaattatgttttataaagattaatggaaaaattggatatatatgttttaaaaggtagaaaaaattgtttgaaagtttagatagtaaaaaaaagaaaaggtaatagggagttattgtatgtttttgagtaaagttaattatattaatagattattagtagataagtagagagtgttaattaattggttaatttttttaatagaataaatttatgttaagttagttttataagaattatgtgacgatttttaaaggtaataaatgtttgtagggtatttaagattgagttattcgcggtgaggaagggggtagttatttgattttttttatatgattatagattgttgcgatatgttataaggtttagaatttattgatttagtttaatttttttttttttttgtgaggagaatgaagttaaagaagcgttatgatttgttggaatattagttgtttaagtaattttattttttaggtttttttagtttttgtgtataacgataggtgattataaaagttgtgtgtagaatggattggagagttaagttttggagggaaggatattagttaaaaataataataacggtaaaataaaataattgtgatattaatttatgaaatattatattaaagtagttagtattaggattaacgagaaagaggaaaaaattgaattattttaaatagattaagaatgtaatttataataagagatgtcgaagaagataataatttagaggtttttagatttgattttgcgaaaaaggtttgtgatttgggtaattaatttggaattaaaagaaagattttagagtgtatttcgaaatttttagaattgttttatataaataattttttttggttttttttattttttttttgattattagaagttgaaagaaaggaattaatttttttttggtttaaagatatttggaaaatatatgattttcgttaatatttttaatattaggttttatgatttaaattatatataattagtaagaaaaggaatttaatatgtgtgttatcggtttatttttttttttgtgtttattttagagtaataaattaagtgttttttaagtttttatttttaagtttttagttagaaaaggatttatttgttatagggaatagtttttgtttttttttatagcgttggaaagagttttagagttaaaaatgaaagtaaattatgtatttttttattgtaaagggcggaaacgtgtaattatagattgtgaaattgttgtttagaattttagatttattattaggaagtgttttgttattagtaaattggtatttaattattggaatttagtttttgatttgggggaaaaaaatgaaaatgataaaatattattttgtgggttgatattttagtttgtttttttttttgttttttgtggttatttaaattttttttatttatttgttttttttttttttgattttttagtttttttttttttgattataaagaacgataatgattgaagaagtttaatttaataatttttttttattttttgataagaattaatttaatagtttatatttttagttttttgggtaggtattgagttgtaggagtttttatatagtttagtagttttcggaattttagtgaggtaggagtttcgtttatttttatggaaagggggttgaagttagggagtaaaatggttttgtagtaggtttatttttatagaagtttgtaagtttagattcgttggattagaatttttattagttagtatagtagtttggagtacgttagagatgatcgagttttttaggggaggggcgattgttattattgtagttttagttagcggtttttttttattagtgttagggaggttgggtagattggattgggtagtagtttttatagtgtagtatagtcgttgtggtagattatggttagattgtttttttaggtgggatcgggatttattttttttttttcggtaagaaatgtttgtaggaattttagtaattttatttagagtttatagatagagtttttatttttttggtatagagtatttgcggagaggggtagttgcggttttaggtttagttaatttaattttttttgtttgttggttttgaagagtattagcgatttagataagggggatttttttagtttagtgtattatttttgttaagggatagttagattttttttttaagtgagtttttgattttgggttttttgattgggttagattatttaataggggttgttagatattttatataggagagttttaataggcgttaggttagtgattttttgggaagaagttttcggaggaaggaggaggtagtattttttgttgttttgtagtttttattggtgatatataggtgaatagtgtttggagtagatttttagtatattgtagtagatttgtagaggaagggtttgaatgttggaagaaaaataaaaaaaaataaaataataataatatagtattaataaaaaagattttataaaaattttatttaaaggttaatagttttaaagattaaaggtagataaatttataaagatgacgaaaaattaacgtaaaatcgttgaaaattttaaaagttggaatgttttttttttttaaatgattttaatatttttttagtaagggtataaaatagggttgaagttgagatggatgaattgatagaagtaggtattagaaagtgtgtaatgataaattttgttgagttaaaggattatattttaatttaaggtaaagaagttaagaatcgtgataaaagattataggaattgttaattagaataattagtttagagaggaatataaatgatatgatggagttgagaaatatagcgtgagatttttatgatttaaatataagtattaatagttaaattaattaggtagaagaaagagtattagagtttgaagattattttgttaaaataaggtaggtagaaaagattatagaaaaaaataaaaagtaatgaataatattttttagaattatgggattatgtaaaaagattaaatttatgattgattgaagtatttgaaagagatgtggagaatggagttaagttaaaaaatatattttaggatattatttaggagaatatttttaatttagtaagataggttaatatttaaatttaggaaatttagatagttttagtaagatattttataagaagattaattttaagatatataattattagattttttaaggttgaaatgaaaggaaaaaatgttaagggtagttagagagagaggttaggttatttatagagggaagtttattagattagtagtggaatttttagtagaaattttataagttagaaaagattggagattaatatttaatattaataaagaaaataatttttaatttagaatttaatgtttggttaaattaagttttataagtgaaggagaaataaaattttttttagataagtaaatgttgagggattttgttattattaggtttgttttgaaagatattttgtaggaaatagtagttatggaaaggaaaatttgttagtagttattataaaaatatattaaaatatataggtttatgatattatgaagtaattatattaataagtttgtaaaattaattaggtaatattatgatgatagaattaaatttatatatattaatattaattttaaaataaatgggttaaattttttaattaaaagatatataatggtaagttggataaaaagataggatttattagtgtgttgtatttaagagatattgttggtgagaatgtaaattaggttaatgattgtggaagagtgtgtggtgagttatttagaatagaaatattatttgattaagaaatattattattgggtatatatttagaagaatataaattattttattataaagatatattatatatatgtatatgtttattgtagtattatttataatagtaaagatatgaaattaattaaaatgtttattaatggtaggttggatagagaaaatgtgatatatatatattatggaatataatgtagttataaaaatgaatgagattatgttttttgtaaggataagaatgaagttggaagatgttattcgtagtagattaatgtaggaatagaaaattaaatattgtatgtttttatttataagtgggagttgaataataagaatatatggatttagggaagggaataatatatatggaggttagataagaggatgggggatgtgagagagtattaaggaaaagagataatgtatgtttggtttaataattaggtgatgggttgatttgtgtagtaaattattatggtatacgtttatttatgtaataaattgcgtattttgtatatgtattttagaatttaaaaaaatattaaaataaaatggtagtatgaagtttaatattgaaggattgtaagaggttagaaattcgtttttatttttaatgagtttgggattagaaaaggtttatgattgtaattgaatttgtagtttttttagttttttaaaatttttatattattgagtgattgatttaattttaaattattttttttgtataatataagtgtataattttgtatttagtgtattgtagtgtttttttagtattttatattttgtttgttattttttttatgtttgttgattgttatatatttttaaggaggttgtgaaatattagggatatatggttgaattatttatttttttaaagttgtgaaaatataataaagaatatattttggttattttattaaatgatattaaatagtttaagtttaaattattaaatagtatttttaatggtgaaaatataggtagtatattgttatatttgaatgtttttttttagaaatataattttagtttttatatatattataagatagttttaaaggaagaagtgatattttttttatagtatttaagatatttaatatagaaatgaaaagcggtttaatagaaataaagataaagagtggtttttattttagaagaaaagtaatggtagatttaaagtaggtagaaaagataataggatttaggaattttatagtttgtggtttaatttttgggttttttttttttaatgtaaatgtgtataaagatgatttatttttattttatataaattttggtgttgtgggaagttagggatttcgaatagagggatcggttaaagttatggtagaagaatataaattgtgaagattttatggatatttattagttttttaaattaatatttttataattttttatgtttgtttttattgtaatttttgaatataaattgtggagattttatggatatttattatttttttaattaatatttttgtgattttttatgtttgtttttattttaatttttttattttattatttttgtaagttgagggtgtatgtcgttttaggattttgtgataattgcgttaattgtataaattgtttaaataatatgaaatttgggtattttgaaaaaagaataagataagagcgacgtttagggaataagggagataattattaggtttggttgtttgagagttgggcggaatagagtcgtatttttttttttttaaaagtaaataggagaaatattgttgaatttttttttttagtaaggaatagaatgcgtttttagggggaggtttttaaaatggttgttttagggatgtttgttttttacggttgttataaggaatgaaataagtttcggttttttatagtgtttttaggtttattaggatgaggaaatttttatttaataaattttggttagattggttgtttgtttttaaattttgttttatgataagatgttattaatgataatgcgtgtttaaagttttattagtaattttaattttattttggttttgtgattttattttgtttttatttgttttgtgatattttattattttgtgaagtacgtgatttttgtgatttatattttattcgtatattttttttttttttgaaaattattaataaaaatttgttggttttgtggtttagggggtattatggaatttgtcgatatgtgatgtttatttcggatatttagttttaaaattttttttttttgtattttttttttttattttttagattggtcgatatttaggga

SEQ ID NO: 35 - DNA, 6641 bp, Artificial Sequence
  chemically treated genomic DNA (Homo sapiens)
taaaattaagagtagtggttagattttgaaaatgtttagtaaataaaattaatgtagtgtgaattgagttggggaataagatatatagaaggtagaagaagtttaatattattaggttttgttgttttttcgtatttggaagttaggtattattttttattatatggaggaggaaatgaaggatggaaatagaagaaaattagtagtttaattttaaaagtttaattgaatgaggttgtgggagtattttaagtgacgttttatttttggacgtatgggtttttatacgggatttatatttgggttgatttataaatttgagttatttatttattattttaaatttataattgatgttatgagaatttatagattatgaaaagaggtttttaagttaaatgttttgaattgttttttataaatattattttatttatttaattggtaaataaatattttatgtatttatgtataaaatgatgtttgaaatatatattgtagaatgtttaaagagttaaataatatatgtattattttatatgtttatttttttttgtgattatagtatttaaaatttatattgttaaataatttttaagaatttattattgattatagttattatgtggtgtaatagattttttaaatttattttttcgatttaattgaaatgttgttttttttgattaatatttttttaaattttttgtttttttttaattattattattttattttttgtttttatgtgtttaatttttgtgagtttatatattagtgagattatatagtatttgttttttggtgtttagtttggtttattttatttaatgtaatgttatttatgttaattaatgttgttataaatgataagattttttttttttttttaaagttgaatattgttgtattatgatattttttttatttatttatttatttatagatatttaggttgattttatattttgtttattgtgaataatgttgtaattataatggaagtgtatatgtttttttaatatattgatttaatgtttaaaatatatattaaatatttgggttgttatattatttttaatatttttaatttattttaatttttaattttttgaggagttttttattgttttttattatgattgtattaatttatatttttattaatagtatataagagtttttttttttttatattttttttaatatttgttatttttttttttataatatttattttaattattttaataggtgtgaggtattattttattgtggttttaatgtttttggtgattagagatgttgagtattttgtatagatttgttgtttatttatgtatttttttttgaaaaatgtttattttggtttttggtttattttgtaatatttgttttttttttattgaattgtgttttttatatattttgaatattaatattttattagatatatggatttaaatatttatttttattttgttggttatttttttatattgttgtttttttggttttgtaaaagttttttagtttgatgtaattttatattttaattttgttttttttttttatatttttagtgttatatttaaaaattattgtttatattagtgttattaagtttttttacgtttttgtgtagtagttttaaagttttagttattaggtttatgtttttaatttattttgagttgatttttgtatatggtggtagataagggttcgtttttatttttttgtttttggatatttaatttttttaatattatttatcgaagaaagtgtttttagtttattgtttgtttttgaaattttgttaaaaataaatttattgtaaataattgggtttatttttggtttttttgttttattttattgatttttgtgtttgtttttatgttagtattatgtttgattattataattttgtagtatgttttaaagttaggttgtgtgttgtttttagttttgttttttatttaaggatgttttggttatttgaatttttaaataattttatatgaattttaaggttgatttttttatttttgtaaaaaatgttattggaggtttaataggaattgtattgaatttatagattttttgggtagtatagatataataatgtaatattttttaatttatgaatacgggatattttttgatttttgtgaattttaggtatttttttttgttaatgttttatagttatgagtatatatatttttaattttttggttatatttattttttattattttatgaaatttttttatagttattataaatgagatttttattatttaattttttagtttgttgttataaaaatgatattaatttttgtatgttgtttttgtattttttaattttattgtatttgtgtattagttttaatagattttttatggagtatttagggtttttttaatatatgtaagattatgttatttataaataggatatattaattttttttttttttattttgatgtttttaaattttttttgttgtttaatttttttggttaggatttttagaatagaagcggtgaaagtgggtgtgtttgttttttttttaatttttgaagaaaagtttttatttttttattattgagtatgatgttaattgtgtgttttttataagtggtatttattgtgttgtaaatttttttaggttaattgttttttatatgtttttatatatttatttagttaaaattatatttatttattaagtatgtaagtaagttaaatagaattttagaatttaggtagagtagatattttattaattaatttgtgtattttttgtaaatttttatattttttgttttaatatttatattgtatttaaaattaacgtttttgttttgttttttaagaagtttttgtaaattttttttttggaatttttttattttttttgagttttttaagtattttatttgtgtttttttaagaagttttttaataattattatgtaatgtagttttatgatttaagagttggggttttggattttgattatttgtatttttatttttgtttcggagttattgtatattttattttttttttataggattatatttaattttttaagtaatttatttgtatatgtttttttttttatataaaagaggttaatatatattttgtatggagtttttgtgaaattttagtaaagtatttgattttatgggggtttaatatatattattattattgaaagtttgttatggttaattttatggaatgtggtgtaaaaataggatttgaattttaatttatgtgatttagggtagtttattatttaaatgatttataaaattgataaaataataaatattttattggtttattgtgagagtttagtatattattatttgtaaagtatttagaagagagatttgtaaataataatgattattattgatatgatataataataataatgataattattgatttattatattagtataatgataattattgatttattatattagtataataatgataattattgatttattatatgagtataataatgataattattgattaaattattataataatgataattattgatattgttaataataatgataattatttatgatataatgatgattgttattgttttatgtgaatttattttttaattataaaaaatatataggagatgttatatttattaaatgtaattttttgttttgttttgtaatttttatgtgtttttttaataatggttggtttattattggtatatgaatttaagataatttggaaaatgagtttggtgtttttaggttaaaattttgtttaatgttttgatatgttttttttagaaaatgtattttgtgtgaaagttatttttatatttagataaattagataatgatttttatagagttaatagaagagaggagatatttggtttttttatatataatttgtttaaattatattttttgtattgaaataagtgatttattattttgatatatatatgtgtgtgtgtgtgtgtatgtgtgtatatatatatgtgtatatatatgtatatatgtgtatatatatgtgtgtatatatatgtatatatatgtgtatatatatgtgtatatatatatgtgtatatatatatgtgtgtgtatatatatatacgtgtgtgtatatatatatatatacgtgtgtgtgtatatatatatatatatatatatatatatatatatatgtgtgtgtgtgtatatatatattttttggtaaaaatttgaattatattaaggagtaatatattaatttagtattatattaatttattataatatttgttaaatatttttaattttaaattttggtttgagaaaaggcgttgaagaattaggtatttagatgtatttatttatttaatgattaagttggatgtttatttatgtatttagtaagtagattaagtatttttaagtattttgagtagaaaattgttaattagtataattgggtatagtttgtgtgttaaaaaatataaatttaaagatatagttaatttattaaggaagttaaatatagagaaaaggaaagattttgtagtttagtaggaataatttatagtttagataagagaatggattgttttgggtgtatatattttaggtaggttattatgagtttgagtaagagagagaaatttgaatataatggatgattaggaatttagtattaggtttaatgttgtagaaaggaaaaagataagttataaaaaataaatttaagtggtaatgaattgttaaatatagtttggtaggaatttgatgggtgagagaatgttataggtataaagaaataatgagtatttgttgaagatatggtaagatagaatgtatttttaagggtgttttatattatagagttttgtttaaagtaagggtaaaattttttaagttgtgtttagagttgaaggagtttttatatttttgatagaagatagtggtaaaaaaaaaaggcgtaagaatttggaagttatgtttaaaggtattttttagaagtggatgggataatttcgtgataaattatatgttaaagaataacgtggttggataaatatttatttagattttagtatttaatacggattaaaagtcgattagtgtaaaaagtaagattggatattttataatggatatttttaattttttagaatttgtttaattataagttttatgtagtgatttttgtgatttttttatttttttttttttatgaaattattatttttattaaatttataattttttttttagggattattttgttttttgtggggtgggatttagtttttaatcggttaaaaggttgagtttttgggtttagattgtgtatggaaataattaatagtagaggtttgtagtaagatatatttaaatttaaatttagattttgttattaataatttgtgtggttttttgtatgtattttaattttttttgttttttaattattagttttattatttatgaaatggggataattttagtatttttttataagattgtggaaggttagaaatattgtgttggttggtattaatatgttaataatttttaagatattagttgttatttagaatttttttttttgagttttagatttatttagttttagatgtatttttaataattttgttttagtgttttattggttttattaaattaatgattatttaaaaattaaatatttttttttttaaataaatttgttttaattttaatttttttttattttagtaaaagaaattaatatatattaaattttttttattagaatgtaattggttgttttattaatgattggtagtaattagaagagggttaggtaaaaaaatttattattttgatatttatattttttaataaaaatttaaattatgttaaggtgtagtgattaatttgatgttatataaatttattatgttagagtagttatgatattatttttaattttaaattttgattgaggaaaagatgttaaaaaattaggattttgggtgtagttatttatttgtttattaagttatgtatttagtaagtatgttaagtatttttaagtattttgggtataaagatgttaatgagtataaagatgtgggtataggatgtgtgttaaaaatgtaaatttaaagatatagtgttttttttaaggaaattaaatatagtaaagaggtaagattgtatagtttagtagtatttatagtttagataagagtatggattgttttgggagtgtttattttaggtaaattattattattatgagttgtgagtaagagaaagagaaatatgaaagtagtaggtgattaggaaattagtattatttttaatgttatagaaggaagaagaaaagttataaaaataaatttaagaggaaatgaattgttaagtatagtttggtatgaatttgataggtgagagaattttgtagttgtaaaaaaagatgtgtgttattcgttggagatatggtaaaatagaatgtatttttagaggagttttatattatagagttatgttttaggtgaaggtagaattttttaagttgtgtttatagttaaaggagtttttttatttttgataga

SEQ ID NO: 36 - DNA, 6641 bp, Artificial Sequence
  chemically treated genomic DNA (Homo sapiens)
tttgttagaaatagaaagatttttttaattatgggtatagtttaaagagttttgtttttatttaagatataattttgtaatatgaaatttttttaaaaatatattttattttattatgtttttagcgaataatatatatttttttttgtaattgtagaatttttttatttattaaatttatattagattgtgtttagtaatttatttttttttaaatttgtttttatagtttttttttttttttttgtggtattgggaataatgttaattttttggttatttgttgtttttatattttttttttttttgtttatagtttatgatgatgataatttatttgaaatggatatttttaggatagtttatgtttttgtttagattgtaaatattattagattatataattttgtttttttgttgtatttagtttttttggggaaagtattatatttttgaatttgtatttttagtatatattttatatttatatttttgtgtttattaatatttttgtgtttaaaatgtttaaaagtatttagtatgtttgttaaatatatgatttaatgaataaatggatgattgtatttagagttttaattttttagtattttttttttaattaaaatttgaaattgaaaataatattataattattttagtatggtgaatttatgtgatattaggttaattattatattttagtataatttgaatttttattggaaaatatagatattaaagtgataaatttttttgtttggtttttttttaattattgttagttattggtaaagtaattagttgtattttggtgggagaaatttgatatatattagttttttttattaaaatggaaaggggttaaagttggaataaatttgtttagaagaaaaagtgtttaatttttaggtaattattagtttaatgaagttaatgaaatattggagtagaattgttgaaaatatatttagagttaaatgagtttggagtttagaggagagagttttggatgatagttaatattttgggagttattggtatgttgatgttagttaatataatgtttttaattttttatagttttgtgagaaagtattgaaattgtttttattttatagatggtaagattgatgattagggagtaagagaggttaagatatatgtaggaagttatatagattattagtaatagaatttagatttaggtttgaatatgttttattataagtttttattattaattatttttatgtataatttgaatttaaggatttagttttttagtcgattggaaattggattttattttataaaagataaggtagtttttgaaggaaaaattataggtttggtgaaaatgatagttttataaaggaaggaggatagggggattatagaagttattgtatgggatttataattgaatagattttaaaaaattggaaatatttattgtaaaatatttagttttattttttatattggtcgatttttgattcgtattaggtattagggtttggatagatgtttgtttagttacgttgttttttagtatgtggtttattacgaagttattttatttatttttgaaggatatttttggatatagtttttaaatttttacgttttttttttttgttattgttttttattagaaatataaagatttttttaattttgggtatagtttaaagagttttgtttttgttttagataaagttttgtaatgtgaaatatttttgaaaatatattttgttttattatgtttttaataaatatttattatttttttgtatttgtagtatttttttatttattaaatttttattaggttgtgtttaataatttattgttatttaagtttgttttttatagtttgttttttttttttttgtagtattgggtttaatgttaaatttttggttatttattgtatttagattttttttttttgtttaaatttatgatgatttatttgaagtgtgtgtatttaggatagtttatttttttgtttagattgtaaattatttttattagattgtaggatttttttttttttttgtatttagtttttttggtgaattaattatatttttgaatttgtgttttttaatatataagttatatttaattgtgttaattaataattttttgtttaaaatgtttaaaagtgtttaatttgtttgttgaatatataagtaaatatttaatttaattattaagtggataaatgtatttagatatttaattttttagcgtttttttttaaattaaaatttagaattgaaaatatttaataaatattatggtagattaatataatattgagttaatgtattattttttggtataatttagatttttattaggagatatatatatatatatatatatatatatatatatatatatatatatatatatatatatatatatatacgtatatatatatatatatatatacgtatatatatatatatatatatatatatatatatatatatatatatatatatatatatatatatatatatatatatatatatatatatatatatatatatatatatatatatatatatatatatatatatatatatatatatatatatatatatatatattaaagtaataaattatttattttaatataagagatatgatttaagtaggttgtatgtggaaaagttagatatttttttttttttgttaattttataaagattattatttagtttatttaaatataaggatagtttttatataaaatatattttttaaagaaaatatgttaggatattgaataaaattttggtttagaagtattagatttattttttaggttattttgagtttatatgttaataatgaattaattattattagaaagatatatggaagttataaaataggataaaaagttatatttaataaatgtaatattttttatgtattttttgtgattaaaaaatgaatttatataaagtaatgataattattattatattatgagtaattattattattattaataatattagtaattattattattataatgatttaattagtaattattattattatatttatataataaattagtaattattattattatattgatataataaattagtaattattattatattgatataataaattagtaattattattattattattatattatattagtaataattattattatttataagttttttttttaagtattttataaatagtagtatattggatttttataataaattagtagaatatttattattttattaattttataagttatttaaataataggttgttttaaattatatgaattagggtttaaattttatttttatattatattttatagagttaattatgataggtttttagtaataataatatatgttgaatttttatgaggttaagtgttttattgaaattttataaaaattttatgtaaaatgtatattaattttttttatatggaaaaggaaatatatatagataagttatttaagaaattgagtgtaattttgtgaaaagaaaatgaagtatatagtaatttcggagtaggaatagaagtataagtgattagaatttagagttttaatttttaagttatgaaattatattatatgatagttgttgaagagttttttaagagaatatagataagatgtttaaggaatttagaaaagatgagaaaattttaggaggagagtttatagaggttttttagaagataagataaaaacgttggttttaaatgtaatgtagatgttggaatagggaatgtgaagatttgtaaagagtatatagattagttaatggaatgtttattttgtttgagttttgaagttttatttaatttatttgtatgtttagtaaatgaatatagttttgattgaatgaatatgtggagatatgtgaaaagtaattaatttaaagaggtttataatataataaatgttatttatagaaaatatatagttaatattatatttaatggtgaaaagataaaagtttttttttaaagattaggaagaggataaatatatttatttttatcgtttttattttagaaattttaattagaggaattagataatagaaagaatttaaaggtattaaaataggagaggaagaagttaatgtgttttgtttatgaatgatatgattttatatatattaagaaaattttaaatgttttatgaaaaatttgttggaattaatatataaatgtagtaaagttgaaggatataaaaataatatgtaaaaattagtattatttttataataataaattaaaaaattggatgataaaaattttatttataatggttataaaaaaattttatgaaataataaggaataaatgtaattaaaaagttaaagatgtatatatttataattataaaatattgatagaagaaaatgtttgagatttataaaaattaaaagatatttcgtgtttatgaattggaaaatattatattattatgtttatattatttaagaaatttatgaatttaatataatttttattaagtttttaatggtattttttatagaaataggaaaattaattttaaaatttatatggaattatttaaaaatttaaatagttaaagtatttttgagtaaagaataaaattggaggtagtatataatttgattttaaaatatattgtaaagttataataattaaatatagtattggtataaaagtaaatatagagattaatggaataaaataaaaaggttagaaataaatttagttatttatagtaaatttatttttgataaagttttaagaatagataataggttaaggatatttttttcgataaatgatgttgggaaaattaaatatttaagagtagaagaatgaaaacgggtttttatttgttattatatataaaaattaatttaaaatggattaaaaatataagtttaataattgaaattttgaaattattatataaaaacgtggaaaagtttaatgatattggtatagataatgatttttggatataatattaaaaatatgggaaaagaaagtaaaattaagatatgagattatattaaattaaaaagtttttgtaaagttaaggaaataatagtgtgaagagataattaatagaataggagtaaatatttgaatttatatgtttgataagatattaatatttaaaatatatgagaaatataatttaataggaagaaaataaatattataaaatgagttaaggattaaaatagatattttttaaaggaagatgtataaatggataataggtttatataaaatgtttaatatttttgattattagggatattaaaattataatgagataatgttttatatttgttagaatgattagaatgggtattataaaaaaaaagataataagtgttggaaaggatgtagagaaaaaggaatttttgtatattgttggtgaaaatataaattagtatagttataatgaaaaataataggaaattttttaaaaagttaaaaattaaaatgaattaaaaatgttaaaaatgatgtagtagtttaaatatttagtatgtattttaaatattaagttagtgtgttgaaaagatatatatatttttattgtgattgtagtattatttataataggtaagatataaaattaatttaagtatttgtagatggatgaatggatggagaaagtattataatgtaatagtatttagttttagaaaaaagaaagaaattttgttatttgtgataatattgattaatatggataatattatattaaataaaataagttaagttgggtattaaaaaataaatattatatgattttattgatgtgtagatttataaaagttaaatatataaaagtagagggtagaatggtggtgattaggaggaggtaggaagtttggggagatgttgattaaaggaaataatattttaattagatcggagaagtaagtttaagaaatttattgtattatatagtgattatagttaatgatgaatttttgaaaattgtttgatagtgtaaattttaagtgttgtaattataaaaaaagatgagtatatgaggtaatgtatatgttatttagttttttaggtattttataatatatattttaaatattattttgtatataagtatataaaatatttatttgttaattaaataaataaaataatatttataaaaaataatttaagatatttggtttgagagtttttttttataatttataaatttttatagtattaattataagtttaaaataataaataaatgatttaaatttatggattagtttagatgtggatttcgtatggaaatttatacgtttaaaaatgagacgttatttaaaatatttttataattttatttaattgaatttttaaaattgaattgttaatttttttttatttttattttttatttttttttttatatagtaaaaaataatatttaatttttaagtgcgggaaggtagtaaaatttggtgatattaaattttttttgttttttgtatgttttattttttaatttaatttatattgtattgattttatttattaaatatttttagaatttgattattatttttaatttta

SEQ ID NO: 37 - DNA, 5527 bp, Artificial Sequence
  chemically treated genomic DNA (Homo sapiens)
ggttttttgttgttgttaaattaataattttagtttttgggtttagttatttgttgttgttaaaaatgttgttgagagtgatggagaggtgttttagtttttattttatagattagaaaattaaggtttagagaaattaagtagttttggagataggagttatggtttttttatttgagttattattttgaaatattaaggataagttaattttattaatagttttaggtttgtgagaaatgggtttggtttattttgaagattgtaaataaataaaaaaatagattgttttattattgatgagaaatatgagttattttgttaggaattgaaagtatagttgtttataaaaaagttatgtcggggtttagtttttttaggtttttgtgtgtgaaaaattatttagttaaagttttttttttatttttttttgtgtttagtaggatgttgaaatttttggaaaagataatggaaattaggggtaggaagagaatagtgtggggtgttaaatagattttagtaatttttttgtttacggttatttttgcgtagatatttcgattttttatgcgtaggtggagtagcgttttttagttttttttagaggtttttttttgtttgttttttagttatatcgtttgagattgataacgttttatagtaagacggaaatttttttttatagtattattttgcgattttgtagttataaagttgagatttttgaacgtggtatttttttgtttttttattgttttacgtgtatttgtgttattttttttgttttatcgtaaatatatttttaaaatttttattttttttatttagaaatagaattataagcggatggttaaataatttaaataaatggtttatggggaaaagtgaattttatattgttttttaaatttttagtgttttttatggagataattattgtttttaatgttttgaatatttttttagagatattttatttttatataagtatatgtgtatttgtgttttttttttattttttttttataaatattagtagattgttttgtattttggttagtttatttaatatattttggagttaggtgcggtggtttatgtttgtaattttagtattttgggaggtcgaggtgggcggattatttgaggtcgggagttcgagattagtttgattaacgtggagaaatttcgtttttattaaaaatataaaattagttaggcgtggtggtatatgtttgtaattttagttattagggaggttgaggtaggagaatcgtttgaatttgggaggcggaggttgcggtgagtcgagatcgtgttattgtattttagtttgggtaatagaatatatagatttgtttgattttttttatgattgttatagttttattgaatgtatggattattagtgttttagttagtattttagtgatgggtatttagggattataaattttataagggtagaaataatattttatttattttttgtttttgatatggtttggatgtgtgtttttgtttaaattatacgttaaggtaattttttatgttagaggtggggtttggtggaggtgattggattatggggatggattttttatgaatgggttagtattatttttttggtgttgtttttgtgatagagtttttatgagatttggttgtttaaatgtgtgtggtatttttttatttttttggttaagtttttgttatgtaagatgtttgtttttgttttgttttttgttatgaataaaagttttttgaggtttttttagaagtagatgttattatgttttttgtatagtttgtggaattgtgagttaattaagttttttttttttatgaattatttagttttaggtatttttttgtaatagtgtgaggatgagttaatatagttttttatattgtaatttaaggtaatgttttgtataaagggatgaattagattgtttagtaattaaaatataaatataaattataagtatatttatttatgaattgggggatagtttttatttgattttgagttttgatatttgttgttttgttttgttaaaaatgtgttagtttttatttagttttttattagttatattattaattaatatgtataatatgtataatttgttaggttaggaggaaatttatggatataagaaatgttttttttttttaggaaatgataatttgttttgggagagaaggtaggtattttttggtaaaagtgatataataaaataattaaaaaaagatggattttttttttttttttgagatggagttacgttttgttatttaggttggagtgtagtggcgcgatttcggtttattgtaatattcgttttttaggtttaagcgatttttttgttttaggttttcgagtagttgggattataggtatttattattacgttcggttaatattttgtatttttagtagagacggggttttattgtgttagttaggatggtttcgattttttgattttgtgattcgtttgtttcggttttttaaagtgttgggattataaatatgagttattgtattaggcgaaaagatggattttttaaaaaaggtgttaggataattaggtttttatttgtaagaaagtaaagttagaagtttattttagattatgtatattagtataaaaatgttaaatggtttaaagataaaatgttaaaataagtttagaaaggtattaaaagaaaatatagaaaatatagtattagtaaaaatttttttatataagatgtaaaagttagaagttataaaggaaaaggttgataaattagaatagataaaaatgtaaaatttttgtataatataagatataaagaatgaatttaaagatatataatgaaggttaggaagatgaagatgttttggcgatgagtggtggttatatattagtattaatgtatttaatgttattgaattgtatatttaaaatgatgaaaatggtaatttttatgttatgtgtattttattatataaaaaaagatatgaaatgaatcggggaaaatatttgttatataattaagaatgaaggtttttaataaaatttgtaaaattatatatatttttaggaatgaattaataaataatttttatgaattagaaaaaagtgataatttaattaaaaaatgaataagggatataagtaatgtgttttatagaaaaaataaaaattgataatgaagttatgaaaaaatgtttagtttttttagtaattgtataaaataaattaaaataatgagatattatttttaagattagtaaatgttaaagaaaaataataattggtgagggtgtggggaagtgggtatttatatttatgtttggaaatataaattggtgtaattttatagggagagtaattttataatattttttaaagatttatatgtataattttatggtagagaaatttattttttttttaggatttttttttttttaaaaatagtgatgtggatgaaaaatatatgtttattattgtatagggtataatagttgaaaattggaaacgataatatttatattttttttagtaggggaatggttaaataaattttataagttatttggtagatattaggtatgagttaaaagttagggtttagttagagatggaaagtatattagtaatttgaaagggaaaatgtaatatgaagaattattaattagtaaaagaaggttaattgttaaaggtataagagtatttaagttgtttgtagttagtaggtttcggttggtgagtaggaagttgttcgttgggaggttgttaaagttttttgaaggtgagtattattggttttataagttgttggtagttatggcgttaagagtaggaagagaagtattagaattcggaagagaaatttagttttttgttaggttttgtatcgtttttttggcgttttttattgataaagttagtaaaattgtgtcgttagtaaaggagatttttttatgggatgtagtttggtgttattaaagagaatagagtggatttggagtttagatgtaatataatgattgatattggtatagtatatttattttgtttttgtaaataaaatggtatatgtgatgtttttttttgtttttttgtatataaaataatatttgtttttatttattatgtatttatgtttttattttgtatgttaggagttaagtattttgtatgtattaatttattttgtttttataataatttttatatgtaggaattattatagttattttatgaatgagtcgaggaaggtattgagacgttaagtaatttgtttaaggttacgtagttagtaagtggtagagtaagaattattatggttttataagtttaggaaaaagtttgaaagaattaaaatgttaatagcggggattttaaggaagtattgaagaggttatgggagaagtttttattttgttaaaaaattagttttttaaataaataaatatagtgaggtttttttagaagtagatgttattatgttttttgtatagtttgtggaattgtgagttagttaaattttttttttttataaattatttagttttaggtatttttttataatagtgttaggatgagttgatatagttttttatattgtaatttaaggtaatgttttgtataaagggatgagttagattgtttagtaattaaaacgtaaatataaattataagtatatttatttatgaattggggggttgttttgtgtgtatagataaggtatattttttaaaaaaattatttttttaagaagaaaataaattagttaataaacgataatttatagtgttaggaagtgagaaataagtgtgtgataaacggtggagaatgggagtatttttcgtagtgggcgggaggagacgaggagggcgttttttggggagtggtagtggttggagtaaaggtttggaggaggtaagttatgtgttttgagtttttggtttttgttttattttgtgtttgagttggtttgaaggttggttgtttagattgagttttttgtttgtttgtatttcgttaatagttttagaagaaggtgattggtggttgtttgaggaatattagtgggtaagagaattagtatttttggagtatttgttgtttgtgagattaagtattatgtatattgttttatttattttttatagtaattttattaagtagtttttttttacgtgaaaagatggaggttgggtggagtaaaaggaggtatttagagtttttagtaagtgagaggtagagttgggatttgaatttagatttgtttgatattgaagtttaggttggttttattttttcggattgttttttagggagtagaagatagatattttattttagttggttgtttttagaagtttgattttgttggtttaaaacgattttagttttttgtttagaggttgcgggttgcgggttaagatattagtagaaggagggtttagttagagaggttgatatgggtttttatttatcgttatttttttttttttttagg

SEQ ID NO: 38 - DNA, 5527 bp, Artificial Sequence
  chemically treated genomic DNA (Homo sapiens)
tttggaaggaaggagagatgacggtgagtagaagtttatgttagtttttttggttgggttttttttttattgatgttttgattcgtagttcgtagtttttgggtaaggaattaaagtcgttttgagttagtagggttagatttttagaagtagttagttaaggtaaaatatttgttttttattttttggaaagtagttcggagaggtggaattagtttagattttagtattaggtagatttggatttaaattttagttttgttttttatttgttgaggattttaaatatttttttttgttttatttagtttttatttttttacgtggaaaagaattgtttggtaaggttgttgtggggagtgaataaagtaatatatatagtgtttaattttatagatagtagatgttttagaaatgttaatttttttgtttattggtattttttaggtagttattagttatttttttttgaagttgttggcggggtataggtaggtaggaagtttagtttgaataattagtttttagattagtttagatataaggtgaaatagaaattaaaaatttagagtatatgatttattttttttaaatttttgttttaattattgttattttttagggaacgtttttttcgttttttttcgtttattgcggagagtgtttttattttttatcgtttattatatatttgttttttattttttggtattgtgagttgtcgtttattaattggtttattttttttttggaaaaataatttttttaaaaaatatattttatttatgtatataaagtagttttttaatttatgaatggatatgtttgtggtttgtatttgcgttttaattattaagtaatttggtttatttttttgtgtaaagtattgttttaggttatagtgtaggaaattgtattagtttattttagtattgttataaagaaatatttaagattggataatttataaagaaaagaggtttaattggtttatagttttataggttgtataggaagtatagtgatatttgtttttggggaagttttattgtatttatttatttgaaggattgattttttaataaagtgaaaattttttttatggtttttttaatgtttttttgaggttttcgttgttaatattttgatttttttagatttttttttaggtttataaagttatagtaatttttgttttgttatttattagttgcgtgattttgggtaagttatttaacgttttagtgtttttttcggtttatttataaagtagttataatgatttttgtatgtgaaggttattatgagaataaaatgagttaatatatgtaaaatatttagtttttggtatgtagagtaaagatataaatatataataagtagaaataaatattgttttatatatagagagataaagagagatattatatatattattttgtttataaaagtagggtaagtatattgtgttagtattaattattgtgttgtatttgagttttaagtttattttgttttttttggtgatattaagttatattttataaaaagattttttttgttagcggtataattttattggttttgttagtagagggcgttagagggacggtgtaaggtttagtagaggattggatttttttttcgggttttggtgtttttttttttgtttttaacgttatgattgttagtagtttgtagaattagtggtgtttatttttagggaattttggtagttttttagcgggtagttttttgtttattagtcggggtttgttgattgtagatagtttgagtgtttttgtatttttagtagttagtttttttttattagttaataattttttatattatatttttttttttaaattattggtgtgttttttatttttaattggattttaatttttagtttatgtttggtatttattagatggtttgtaaaatttatttaattatttttttattgaagggaatgtgagtattatcgtttttagtttttagttgttatattttgtgtagtagtgaatatgtgttttttatttatattattgtttttgaaggaaaaaaaattttggaagaggaataaatttttttgttatagggttgtgtatgtaagtttttggaaaatgttgtgagattgttttttttataaggttgtattaatttatatttttaaatataggtgtaagtgtttatttttttatatttttattaattattatttttttttaatatttattaattttaggggtaatgttttattgttttagtttgttttgtgtaattattaaggagattgaatatttttttataattttattgttaatttttattttttttgtgaaatatattgtttatattttttatttattttttagttggattgttatttttttttaatttatagaaattatttgttgatttatttttaaaagtgtgtatagttttatagattttattaagggtttttatttttagttatgtagtaaatatttttttcgatttattttatgtttttttttatgtgatgaaatatatataatataaaaattattatttttattattttaagtgtatagtttagtaatattaagtatattaatattgatgtgtaattattatttatcgttaaaatatttttatttttttaatttttattgtatgtttttaaatttattttttgtgttttatattatataaaagttttatatttttatttattttaatttattaatttttttttttatgatttttggtttttatattttgtgtagggaaatttttgttggtgttgtattttttatatttttttttaatatttttttagatttgttttaatattttatttttaagttatttgatatttttgtgttggtatgtatggtttgaggtgggtttttaattttatttttttgtaggtggggatttgattattttaatattttttttaaaaaatttattttttcgtttggtgtagtggtttatgtttgtaattttagtattttgggaggtcgaagtaggcggattataaggttaggagatcgagattattttggttaatatagtgaaatttcgtttttattaaaaatataaaatattagtcgggcgtggtggtgggtgtttgtagttttagttattcgggagtttgagataggagaatcgtttgaatttgggaggcggatgttgtagtgagtcgagatcgcgttattgtattttagtttgggtgatagagcgtgattttattttaaaaaagaaaaaaagatttatttttttttgattattttattatgttatttttgttaaaaagtatttgtttttttttttaaagtagattattattttttagaagggagggatattttttgtatttataagtttttttttgatttggtagattgtatatgttatatatgttggttggtgatatgattgataggaagttgaatgagaattagtatatttttaataaagtaaagtagtaggtattagaatttagaattaaataaaagttgttttttaatttatgaatggatatgtttgtggtttgtatttgtgttttaattattaagtaatttggtttatttttttgtgtaaagtattgttttaggttatagtgtaggaaattgtattagtttatttttatattgttataaagaaatatttaagattggataatttataaggaaaagaggtttaattggtttatagttttataggttgtataggaagtatagtggtatttgtttttggggaagttttagagagtttttatttatggtagaaggtaaagtaagggtaagtattttatatggtaggaatttgattaagagagtggggaggtgttatatatatttaaataattagattttatgagagttttattataagaatagtattaaagggatggtgttaatttatttatgaaggatttatttttatgatttaattatttttattaggttttatttttgatatgggggattattttgacgtgtgatttgggtagggatatatatttaaattatattagaaatagaggatgggtaagatattgtttttgtttttatgaagtttgtgatttttaaatgtttattattaaggtgttagttggagtattgatgatttatatatttaatggagttgtagtagttatgaaaaggattaagtagatttatatgttttgttgtttaggttggagtgtaatggtacgatttcggtttatcgtaattttcgttttttaggtttaagcgatttttttgttttagtttttttagtagttgagattataggtatgtgttattacgtttggttaattttgtatttttagtagagacggggtttttttacgttggttaggttggtttcgaattttcgattttaggtgattcgtttatttcggttttttaaagtgttgggattataggtatgagttatcgtatttggttttaagatatgttaaatgagttaattaaggtgtaaaatagtttgttagtgtttgtggggggaaaatgagggaaggatataaatatatatatgtttatataagaataaaatatttttgaaagaatatttaaaatattagaaataataattatttttataaaaggtattgaaagtttgggggatagtgtgaaatttatttttttttatggattatttgtttaaattgtttaattattcgtttgtagttttatttttaaataaagaaaatgggaattttagaagtatgtttacgatgaaataagaaagatgatataggtatacgtgaaatagtaagggaatagaagagtgttacgtttagaagttttaattttgtggttgtagaatcgtaaggtggtgttgtaaagggaggttttcgttttgttgtagggcgttgttaattttaggcgatgtggttggaaggtaggtagaaggaagtttttggaaagaattaggaaacgttgttttatttgcgtatggggggtcgaggtgtttgcgtagagatggtcgtgggtagggaggttgttgagatttgtttagtattttatattgttttttttttgtttttgatttttattgttttttttagaaattttagtattttattgagtataaagagaaataaaaggggaattttgattgagtggttttttatatataaggatttggagaggttggatttcggtatagtttttttatgggtagttgtatttttaatttttggtagaatgatttatattttttattagtaatggagtagtttatttttttatttgtttataatttttaagataaattaagtttattttttataggtttaaaattgttgataaagttggtttgtttttgatgttttaagatgataatttaagtggagaggttatggtttttatttttaagattatttagtttttttgggttttgattttttgatttgtaaaatgggaattaaaatatttttttattatttttagtaatatttttagtagtagtaggtggttaaatttaagggttggagttgttaatttggtagtagtaagaagtt

SEQ ID NO: 39 - DNA, 10696 bp, Artificial Sequence
  chemically treated genomic DNA (Homo sapiens)
ttaaaagggagttttagagtaaatataggttttggattttatcgttaataattatagaatatgaatattagtttttttgcgtaaaatattttagatagatatatatattgaatatagaaatagagataaataaaagttagttataatttagattttatttttgttaagattgtttagtttatgttaaatttttatttttttgttttatttattattttcgggcgagttttttataagtttttttaatattagtttgattggttgttcggttgatttttaggattttgtatgggttaaaatttaacgtagatagaatttgtaggattagaattagaattattaagaattgttaggaaatgtttaatttttttatttttatttttttttttttttagagttgaaatgattgaagaggtaatgagttttagtggtagaaatttggatagttttgttttttaggtaaaggtataagatatatagatgaaaaataaaattaataaaaggtattttgtaggaaaagtgttaagttgttgaattgtattttaaaataaaaatttcgttattgtttttgaatattataaatgagaattattatagatgaaaagatgagtaataagaatagtaattttttagaatattttgattagaaaagttttagaaatgaatgaaaatgaatgggatgtagaaataatatataaatgagagaaaatttaaataggataattaggacgattattttttaaatatatgattttatttattttgataagaataaataaaataaatggtttaagaatattttattgagtatatgttaaataaatttatgaaattgtaagatttattatgtataaaattataaaatgagatagttgtggtatttttgggtattaaataagtataaatatggacgtgaaatatttttaaaaaattgtgtagttaagacgtagtatgttttaattttatttttttttattatattatttaaataagaaaatgagaagttgttttttaattattagtaatatggtgtttttttgttttttttttttgagacggagttttattcgttgtttaggttggagtgtaatgatgggattttagtttattgtaattttttttttttaggtttaagtaagttttttgttttagtttttttagtagttgggattataggtatgcgttattttgtttagttaattttttgtatttttagtagagatagggttttattatgttggttaggttggttttgaatttttgattttaggtgatttattcgtttcggttttttaaagtgttgggattataggcgtgagttatcgcgtcggttaatatggttattattaatggaaattttagatgagaaaaagcggtaagaaaaaatttagttttatatgtgaagaagaattaacggtaaagattaaatagtaggcgtggtttttaaaagttttaagttttatttttggtgagtatagtgatttaatttattgtgaattttggaaataattttggttggttaatgaatagggtagtgttggaattgtagatatttatattttataattatgattgttgttatattttataatgtttttttttaaggaatatatttattttgattttttataagttaatatagttttaaggtttaagtgttttttgtgatattttattgaagaagggtaaagttataatagtggtggattttcgtaagtgtaagtttaatgtcgtttgggagtttttataaaattgattaatttgatgattaacgtttaaaattgtatacgtgttgaataaaattttaaaataaattagttttttttttgttaaggtaatttattatattttagaaaatacgtgaaggtaatgtagttattggttaagtatatgggttgaagattaggatttattttttattattttattatttgggtaaattatttaaatttattaagtattagcgtttttatttataaaatgggaatgaatattattattttgaaggattattatgtggggattaaatgtatgtaaagggtttattgagtttagagttaatagttaataaatggtcgttagtgttattatttttattatgtagtacgatcgttgttttatttaattatgttagttttttttagttagagggtcgaagtggcggtggtttgggaagttttttagttgatatgcgagatagacggcgtcgatttcggagtagtaaatatttgtttaataggtaggttgttagttttttgggtagtatatttaggattaggaagaagtttttagagataagttttaggtttaagtttcgtttcgcgtttttgtcggaggtcgtaattttgtaggagatagttttttttttcgtcgtttttcgagagtttagggttcggttttgttggttttcggtttttttcggggttagtagtgattggaaacgagaaggaattgaggggaaatttttgagtcggtttggtttcgtcgcgttcgcggtttcgcgcgttacgtcgggaaggagttatcgggaaagtatatcggtttaatcggttgtagtttcgtgttttagttagttcgtcgggtcgggagtttttcgtttatattagcgttcgtttgggtttggggaggggaaagaggaggggataagttcgaggggagttacgtgacgtttaaaggtttatcgtattgaaggcgaggatcgaataggtcgagggcgtttattgggcgaatttattttgatttttgttattcgtcgtttaggcgtggatttggggtggttgttatagaaacgaggcgcgttttttggttgtagttaaaaggttgatcgtgattaaagaggttaaaacgtgttttttagcgaggcgaagtcgttatgtatgatgggatattagaaggattttttcgatttaggaaggtgttttcgtttttatcgggagatggttttcgtttagtaatagttgttaggatggggacgtattttttggtttttattttttttaattttattcgtagaattttagagcgttagattggaagtgattttagggattttttaattttttaatttttgtaatattgatagggagatcgaggtttagagaggggtagagatttgtttaaggtttagaatttagtattttttttatttttgtttatttattttttttttttttgagagaatttaggatttttaatttcgtttatcgaaaatcgagttttatttaagaatgtattagtttgtgttttaagtacggggaaagggcggtgggggtggagagagggataaggtataggtaagtgaaggaaattttttttgagttaatgagatagattttttgcggatataaagagtttttatatttttttgttttgtttttatttttttttttttgtatttattattatttaatatagtatgttttatttattgatatagtttattatttgatttttttattggaatgtaaattttaaaagtagggtattttgttttgtttatttttatgtttttagtgtttgattataggtttaataaatattcgtagaagtgaacgaatggggttgaggttttggtgtttaagagattatattttaaggtggatttttaagagtgtggtttatagagttaggttcgggttttaattttgtttgtttcggttatttagtatttaagtgattttaaatattcgtttttttgaattttagggtttatatttgtaaaatcggcggggggtgggaatatttttttggtaggattgtagttaaggataagtgaaataagtatgaaaagtggttagtacgatgtttgggatttagtaaatgtttagtaaatagaaacgattatttttgaaatgtgaaaatgaatcgtttagaacgatgggagtttataggattagatttttgtcgtttttttttttttttgtgtgggaggtgttagggtgggagggagggaagagggaatggaagattgtgtaaggtgggtttggttggattagatattcgagtttggaatagttaattgcgatttgggtataagggcggtgaggggagtttatggttttatttggggtggaggagggggttaaggggaagttatgtttcggaggaggttgaatgggcgggatagattacggttttatttatggttttttttttgttggaagtgtgacgatttttttcggatttttgtaaaagcggggttatagtgaattttggcgaagggttcgcggtggattaggaattggtgttagaattgtaaaagggtatttgcgttcggagtggggaggtgatgcgggggcggggcggggttttgggggcggggcgagtcgcggaggtgtcgttttggggcggggcggtgatagaaggatggattttgggggtgaggattgattttgggggcggggcgagagtgcgaattggagtttgaggttgagcggtgacgtaaggacgattttgagggtggagcgaggggaggggattggtttttggaggcggggcggtggtacgaggttagtttttgggggcggggcggtggcgtaagattgattttgggggcggggtgggggcgtgggttgaattttgggggcggggcggtggcgcggaatggattttggggtcggcgcgaggcgttgaggtgcgttttgagggcggggcgatgacgtagagcgaattttgggggcggggcgagattttttagatgcgtttcggggagtgggcggtgacgcggtggtaggttttggggataggcggtgattttagaattgattttggggatagggcgaggcgcggaggcgttttgaaggcgaggcggtgacgtaagagcgtcgggttttggggattggggcgggcggtcgaggttcggaagcggattgaggcggtttggagttttagttggttattcgttatggacgaagcggatcggcggtttttgcggcggtgtcggttgcggttggtggaagagttgtaggtggattagttttgggacgttttgttgagtcgcgagttgtttaggttttatatgatcgaggatatttaggtgcgttttcggttttttgttttcgcgttgtacggtcgggtttttacgtttttcgaggaggcgttgtgcgggagtttagttttttttgtggttttaaattttttagcggagttaaagaattttaaatattttttagtcgggtgttcgttaaagcgattttatgttatatttagttagcgtatattgttagtgtttgtgttttttgtgtaaaggaaaaatgtgagatatattttgagaattttgaataagaaataatttatgaattggagaatattagattgaaagagttttagtgttgtaatgataaaacgttagaggtaagtatttattgggaaaatgtggaagtaaaataaagaaattatttgattggtttgtagttataaaattgttttttttttttaaggtttgttaattgattgtttttggttggttttaagttttatttttttttaatataagtatttattagatatgatttaagttaaattttgtttatgtttgtagtttaagtaagatttaggttatttaggatatttgattggttttgtttgtttaggaattttttatggttggtttttattttaatttacgttaatatttgcgaggaaggaggcgtgtgcgtttttatttttttagtatagaggtttcgggaatttattttggtattaggttgtttggtagcgtgtttttgggttagttatttattttttttgagttatagtttttgggttgtgaaatgggaataagaataatattgttataaggattaaatgaaataacggatgtgaaattgtagtgttaggtatagagcgggggattagcgtattttgttttttttggttagttttttttgtgtttagtttatgttttgttaagaggttttggaaatgaggggatttgatgtagaatggagaataatgaagttaaatatttgaggttttgtttaaaagtatttttttatttttgttttatttgatttttattataggtttgtgaggatgtaggagatattttttattatgaggtgtagtaggtgtgagtggttggttggatatttttggttagtgttttggtttagggaaagagtttttaaataattgagtattatatgagtaattatttattaataataaaataagttttgtgttttttgtgtggtttttattggggaatagtaatggtttgaggttatagtttttgtttttaggaatgtttacggggattataaatttaaatgtttatggaggattaatggatgggcgttatagtggatagtttttgtattgtttttcgtttttagttgagtatggttatattaataaatggtttagtattgttatattttatatttattttgaggtagggttttatttttgtttagtttggagtgtagggatgagattatggtttattgcgattttgattttttgggtttaagtggtttttttgttttagtttttagagtagttgggattttaggtatatgttattatgtttggttaattaaaaaaaattttttttttgtatagataggagttttgttatgttgtttagatgagttttaaatttttggttttaagtgatttttttgttttagtgttgggattataggtgtgagttattgtattcggtttagtttttatattttaaaaaagaagttgaaaattttgatttttttgttaaattttttggtttaaaatgttagtaataaatttagaaattttttaagaatttggtgggaattataggttgttatttgttatttagtatggttgaaaaataggtaggtttggaattagtggatttgggtttttattttggtttgttatatattagtaagtgtaaaaaattataattaatgagttaaataaatagaaaaattttatgatttagtttttttgaaattttttattttaaaaagtgggaagttttaatttaattttataaagttatgagggagaaaaagatgaaataatgtatttaatataggttgattttttggagtgtttagtaaatgtggagagaaatttaaatattattatttatttgtatgtagttaattgttttgttagtgagatttatttttttagggtattgtaggtttgtgttgtttttaatagtagttattagttatatgtcgttaaaggtaaattgaagtaattaaaattaaataaaattaaaaatggtagggttaagttttatagggtttgtgggttttttttttcgtgtgcggagatgagagatcgtagaaataaagatataggagaaagagatagaaaaaaagatagttgggttcgggggattattattatttagacgtggagatagggtagtggtttcgaatgtttggttgcgttgttattggatataaggtaaggggatagggtaaggagggtgaattttttaagtgatgataaggtgaagtaagttacgtgattataggataggggttttttttttttaggtagttgaagtagagagagaaggtagtatatgttagcgtttttttttatgtatttataagaaagattaaagattttaagatttttattattttttttatcgttatttatgaattttaaataggaattaggagtacgggaggaatatgaaagtgggtaaggagcgtgattatggaagtatagtattatagggaggggtttaggttttcggatgattgcgggtaggtatggataatatttagttttttataagaagttggtggagtagagtgttttttgacgtttttaaggaaaggagatttttttttttttttttttttttttgaggtggtgttttattttttcgtttaggttggagtgtaatggtacgattttagtttattgtaatttttatttttcgggtttaagttattttttttttttttttttttttttttgagacggagtttcgttttgtcgtttaggttggagtgtagtgtcgtaatttcggtttattgtaagtttcgtttttcgggtttatgttattttttttttttagtttttcgagtagttgggtttataggtattcgttattacgttcggttaattttttgtatttttagtagagatggggttttatcgtgttagttaggatggtttcgattttttgatttcgtgatttgtttattttggttttttaaagtgttgggattataggtttgagttatcgcgtttagttagggtttaagttgttttgttttagttttttgagtagttggaattataggtgcgtattattacgtttagttaatttttttgtatttttagtagagacgggttttatcgtgttggttaggttggttttgaatttttaattttgtgatttgtttgttttggttttttaaagtgttgggattataggcgtgagttatcgcgtttggtaggagattttttttcgcggtttgttaagtaatgggtgtttttttagatattggtattatcgtttgattaaggagtttttaagcggtttttatgcgggtttgatagagggtttattttttgttttttaggttattttttataatgtttttttagtatttgattttatattcgtcggttatttttaagttatattagtaatgtaataaagagtaatattaaaagttaatgattaataatgtttataataatgattgataattgtttatgattatttttatatttaatttgtattatgattatttttattttaattattttttttattatattgaaatagtttgtggttttagttttttgtttcggtatttgggtaatttttcgtttataaaaatttagttttttagttgtattatttaagtgtttaatggttatgtgatatatggttattaaataggataatatagattaagaatatttttattattacggaaggtttttatagatagtgttgttgtaggatagttgaggatacggtgttattttatttttgtggattttgagaatttgtttagtgttgggtatttgaggataggtggtagataattagattttttttttttagtgattgattttattattttgatattttttaatttttttttttgagatagggttttgttttgttatttaggttgaagtgtagtggtgttattatagtttattgtagttttattttttgggttcgagttatttttttgggagttttagttttttgagtagttgggattataggtgcgtgatattatatttggttttttttttgttattttttgtagagatagggttttattgtgttgtttaggttggtttcgaattgggtttaagttatttttttattttagttttttaaagtgttggaattgtaagtatgagttattgtgtttggtttgtttgttaattttgatttttgttttgtttttatagtttttttagttagtgtttatgttttatggattttttttttttgtatttttgttttgtttttttatttttttttattttagttgtattatttttgttgttttttgatttggttatggtttatttttttttattttttattttgatttttggatgattttttgaaaggttatatttgtttttgttattttatttttaaaattttttggtggtcgggtatggtagtttacgtttgtaattttagtattttgagaggttgaggttggtggatcgtttgaggttaggagttttgagattagtttggttaatatggtgaaattttgttttaattaaaaaatataaatattagttaggtatggtggtgggtgtttgtagttttagttatttgggaggttgatgtgggagaattatttgtatttaaaaggtggaggttgtagtgagttgagatggtgttattgtattttagtttgggtgatagagtaagattttttaaaaaataaataaaaaaataatcgatggttggttacggtggtttatgtttataattttagtattttgggaggttaaggttggaggattatttgaggttagtttaagattagtttgggtaatatggtgaaattttgtttttattaaaaataaaaaaaaaattagttaggtatggtggtgtgtgtttgtaattttaattatttcggaggttgaggtaggataatcgtttgaattttggagttggaggttgtagtgagttgagattgtattagtatattttagtttgggtgatagagtgagatttcgttttaagaaaaaaaaaaaaaaataaaaataaaattaaaaaattttttggtggtatttgataggttttaggatgaattttttggtttggttatataaaggttttgttttttgttattatttattttttattttataagattttgaattcgttatttattttatgatatttttagttttatgtgtttttttttgggtatttgttttttgttgtgttattgttgatttgtttgattgtattttttattagaaatttgttttttaaggattgagattgtttatggtagtatttttagtatttagtatagtgttgggtattttttgttttgtaaaataatgaatagattagtaaaggttggtaaatggtatatagtgtatttgtagttttattgttgtttacgtgtttgattgtttagatttatagtagttgggaaatggggagataaggtgagagttatataaaagtacgtggataattagtattttgtttttttttttaaatagt

SEQ ID NO: 40 - DNA, 10696 bp, Artificial Sequence
  chemically treated genomic DNA (Homo sapiens)
gttgtttggaaagaaaggtaggatattaattatttacgtatttttatatggtttttattttgtttttttattttttagttattgtaagtttaaataattaggtacgtgggtagtaatggagttgtaggtgtattgtgtgttatttattagtttttgttgatttgtttattattttgtagggtaaaagatgtttagtattatgttaagtgttgaaaatgttgttatggatagttttagtttttaaggagtaaatttttaatggggaatgtaattagataaattagtaatgatataataagagataagtgtttagagggaagtatatggggttgaggatattatgaagtgaatagcgaatttagagttttatgaggtgggaggtagatagtggtaagggataaggtttttgtgtggttaggttaagaaatttattttgagatttgttaggtgttattaaagagttttttggttttgtttttgttttttttttttttttttgagacggagttttattttgttatttaggttagagtgtattggtgtaattttagtttattgtaatttttaattttaaggtttaagcgattattttgttttagttttcggagtagttggggttataggtatatattattatatttgattaattttttttttatttttagtagaaatagggttttattatgttgtttaggttggttttgaattgattttaagtgattttttagttttggttttttaaagtgttgggattataggtatgagttatcgtggttagttatcggttgtttttttgtttgttttttgaggagttttgttttgttatttaggttggaatgtagtggtattattttagtttattgtaatttttattttttgggtataaatgatttttttatattagttttttaggtagttgggattataggtatttattattatgtttggttaatgtttgtattttttggttaagatagggttttattatgttggttaggttggttttaaaatttttgattttaagcgatttattaattttagttttttaaagtgttaggattataggcgtgagttattatgttcggttattaaagagttttaagaatggagtgatagagatagatatggttttttaaaaagttatttaggggttagggtgaaaaatggaaaggagtgagttatagttagattaggaggtagtaaagatggtgtagttagaatagagagaagtgaaaggataaagtagagatataaagagagagggtttataggatatgggtattgattggggggattgtgaagatagagtaagggttaaggttgataggtaggttaggtatagtggtttatgtttgtaattttagtattttgggaggttgaagtgggaggatagtttgagtttagttcgagattagtttggataatatagtgagattttgtttttataaaaaataataaaaaaaaagttaggtatggtgttacgtatttgtagttttagttatttaggaggttgaggtttttaagaggatggttcgagtttaggagataaggttgtagtgagttgtgatagtattattgtattttagtttgggtgatagagtaagattttgttttaaaaaaaaaaattgagaggtgttaggatggtggggttagttattaagaaggaagagtttggttatttgttatttgtttttagatatttagtattggataggtttttaggatttatagggataagatggtatcgtgtttttaattattttatagtagtattgtttatgagaatttttcgtgatgatggaaatatttttggtttgtattgttttatttagtaattatatattatatgattattaagtatttgggtagtataattgaggaattgaatttttgtgggcgaaagattatttaggtgtcgaggtaagagattgaagttataaattgttttagtataataaagaaaatagttagaataagaatagttataatataaattaggtatagagatgattatggataattattaattattattataaatattattaattattagtttttaatattattttttgttgtattgttaatataatttaggaataatcggcgggtatagggttaggtgttgaagggatattgtgagaagtgatttagaaggtaagaggtgagttttttgttaggttcgtataagggtcgtttgagggttttttggttaagcggtaatgttagtgtttggggagatatttattatttagtagatcgcgaaggggagttttttgttaggcgcggtggtttacgtttgtaattttagtattttgggaggttaaggtaggtagattataaggttaggagtttaagattagtttgattaatacggtgaaattcgtttttattaaaaatataaaaaaattagttgggcgtggtagtgcgtatttgtaattttagttatttaggaggttgaggtagaatagtttgaattttggttgggcgcggtggtttaagtttgtaattttagtattttgggaggttaaggtgggtagattacgaggttaggagatcgagattattttggttaatacggtgaaattttatttttattaaaaatataaaaaattagtcgggcgtggtggcgggtgtttgtagatttagttattcgggaggttgagggaggagaatggtatgaattcgggaggcggagtttgtagtgagtcgagattgcggtattgtattttagtttgggcgatagagcgagatttcgttttaaaaaaaaaaaaaaaaaaaaggaaaatagtttgaattcggaaggtggaggttgtagtgagttgagatcgtattattgtattttagtttgggcgaaaaagtgggatattattttaaaaaaaaaaaaaaaagaaagggagttttttttttttggaggcgttagggagtattttgttttattagttttttgtgggaggttggatattatttatgtttgttcgtagttattcggagatttaaatttttttttgtggtgttgtgtttttatggttacgttttttgtttatttttatgtttttttcgtatttttggtttttgtttgaagtttatagatagcggtagaagaaatagtgaaagttttaaagtttttgattttttttataagtgtatagaagaaaacgttgatatatgttgttttttttttttgttttagttatttaaaagggaagggtttttgttttatgattacgtgatttgttttattttattattatttagaagatttattttttttattttgtttttttgttttatatttaataatagcgtagttaggtattcggggttattattttgtttttacgtttaggtggtagtggtttttcgggtttagttgtttttttttttattttttttttttgtgtttttatttttacgattttttattttcgtatacgaggagaaaaatttataggttttgtaaggtttgattttattatttttagttttatttaattttaattattttaatttatttttaacgatatgtggttaatggttattgttgggaatagtatagatttatagtgttttgagaaggtaagttttattagtagaatagttggttatatgtaaatagatggtggtgtttaggtttttttttatatttgttgaatattttaggaggttaatttgtgttaaatgtattgttttattttttttttttttataattttatagagttaaattagaattttttattttttagggtaaaaaattttagggaaattgagttatagggtttttttgtttgtttggtttattggttgtggttttttatatttgttaatatgtaataggttaggatgagagtttagatttattggttttaaatttgtttgttttttagttatattgaatggtaaatggtaatttgtggtttttattaggtttttaaaaaatttttgaatttgttgttaatattttaagttagggaatttgatagaggaattaagatttttagttttttttttaagatgtgaaagttgggtcgggtatagtggtttatatttgtaattttaatattgaggtaggagaattatttgaggttaagagtttgagatttatttaggtaatatagtaagatttttatttgtataaaaaaaaaattttttttaattagttaggtatggtggtatgtgtttaaagttttagttgttttaaaggttgaggtaggaagattatttaagtttaggaggttaaggtcgtagtgagttatgattttatttttgtattttaggttgggtaagagtgagattttgttttaaaataagtgtaagatgtggtaatattgggttatttgttgatatggttatatttagttggagacggagggtagtgtaaaggttatttattatgacgtttatttattggttttttatgggtatttgagtttgtgattttcgtgaatatttttgaaggtaaggattgtggttttaaattattattgttttttagtaggggttatatagaaggtataaaatttattttattattaatgaataattatttatatgatatttaattatttaaagattttttttttgggttagggtattggttagggatatttagttagttatttatatttattgtattttatggtaggaaatattttttgtatttttataggtttgtgatgagggttaaatgagataaagatgggaaagtgtttttaaataaaattttaaatgtttgattttattattttttattttgtattaggtttttttatttttaaaattttttaataaaatataaattgaatatagaaggggttggttaaagagggtagggtacgttgatttttcgttttgtgtttagtattatagttttatattcgttattttatttagtttttatgatagtattatttttatttttattttatagtttagaaattgtggtttaaagagggtaagtgattggtttaagaatacgttgttaggtagtttgatgttaaagtgggttttcgaaatttttatgttagaaaagtaaaaacgtatacgttttttttttcgtaagtattaacgtaaattaaaatggagattaattatgaagaatttttgagtagataaaattaattaggtattttaagtgatttaaattttgtttaaattgtaaatataagtaaaatttaatttgggttatatttgataaatgtttatgttagagagaaataaaatttaagattagttaaaagtagttaattaatagattttaaaaaaaaaaggtaattttgtaattgtaaattaattaaataatttttttattttgtttttatatttttttaataaatatttgtttttgacgttttgttattgtaatattaaagtttttttagtttgatgttttttaatttatgaattgttttttatttaaagtttttaagatgtgttttatattttttttttatataagaaatataagtattaatagtgtacgttgattgagtatggtatggaatcgttttagcgaatattcgattaagaggtgtttgggattttttggtttcgttgaggggtttgaagttatagggaaggttaggttttcgtataacgttttttcgaggggcgtggggattcggtcgtgtagcgcggggatagggggtcgggggcgtatttggatgttttcgattatatggggtttgaatagttcgcggtttagtagggcgttttagagttggtttatttgtagtttttttattagtcgtagtcggtatcgtcgtaggagtcgtcgattcgtttcgtttatggcgagtagttaattaagattttaggtcgttttagttcgttttcgggtttcggtcgttcgttttagtttttaggattcggcgtttttgcgttatcgtttcgtttttaggacgttttcgcgtttcgttttgtttttagggttaattttggggttatcgtttgtttttagaatttgttatcgcgttatcgtttatttttcgggacgtatttagaaggtttcgtttcgtttttaggattcgttttgcgttatcgtttcgtttttaggacgtattttagcgtttcgcgtcgattttagaatttatttcgcgttatcgtttcgtttttaggatttaatttacgtttttatttcgtttttaaggttaattttgcgttatcgtttcgtttttaagggttagtttcgtgttatcgtttcgtttttaagagttaatttttttttttcgttttatttttagaatcgtttttgcgttatcgtttagttttagattttagttcgtattttcgtttcgtttttaaagttaatttttatttttaggatttatttttttgttatcgtttcgttttaaggcggtattttcgcgattcgtttcgtttttagggtttcgtttcgttttcgtattatttttttatttcgggcgtaggtgtttttttgtaattttggtattagtttttggtttatcgcgggtttttcgttagaatttattatagtttcgtttttatagagattcggagggagtcgttatatttttagtaagagggaaattatgagtggagtcgtgatttgtttcgtttatttaatttttttcggggtatggtttttttttagtttttttttttattttaagtaaaattataagttttttttatcgtttttgtgtttagatcgtagttgattgttttaaattcgagtgtttgatttaattaagtttattttatatagttttttattttttttttttttttttttattttaatattttttatatagaaaaaaaaaaaaacggtagaaatttagttttgtaaatttttatcgttttgaacggtttatttttatattttaaaaataatcgtttttgtttattgagtatttgttaagttttaggtatcgtgttagttattttttatgtttattttatttatttttaattataattttgttaggaaagtatttttatttttcgtcggttttatagatgtagattttagggtttagggaaacgaatgtttaaggttatttgggtattaagtggtcgaggtaggtaggattgaaattcgaatttgattttgtaagttatatttttaagaatttattttagaatataattttttgagtattaaaattttagttttattcgtttatttttacgaatatttattgagtttgtagttaaatattaagaatatgaaggtgaataaaataaaatgttttgtttttagagtttatattttagtggaaggattaggtgataaattatattaataaataagatatattatgttagatagtgataaatgtaaagagaaaaaaataaaaataagatagggagatatgaaagttttttatattcgtaagggatttattttattggtttaaagaaagttttttttatttatttgtgttttatttttttttttatttttatcgtttttttttcgtgtttaaggtatagattggtatatttttgggtggagttcggttttcggtaaacgggattaaaagttttggatttttttaaaaaaaaaaaagataagtaaataaaaataaaaggaatgttggattttaggttttgggtaaatttttgtttttttttggatttcggtttttttattaatattgtaggagttggagagttaaagaatttttaaggttatttttaatttgacgttttaaggttttacgaatagggttaaagagaatagggattagagagtgcgtttttattttagtaattgttgttagacgagggttatttttcggtaggagcggaaatatttttttggatcgaggaggtttttttggtattttattatgtatagcgatttcgtttcgttaggaggtacgttttggtttttttggttacgattagttttttggttgtaattaaagagcgcgtttcgtttttatagtaattattttaggtttacgtttagacggcgagtggtaagggttaaaatagattcgtttagtagacgttttcgatttgttcggttttcgtttttagtgcgatagatttttaagcgttacgtgatttttttcgggtttgttttttttttttttttttttttaggtttaggcgagcgttggtgtggacgggaagttttcggttcggcgaattaattggagtacggagttgtagtcggttgggtcggtgtattttttcggtaattttttttcggcgtgacgcgcggaatcgcggacgcggcggggttaggtcgatttagggatttttttttagttttttttcgtttttagttattgttggtttcggggggagtcgggagttaatagggtcgggttttgggttttcggagggcggcgggggagggggttgttttttgtagggttgcgattttcggtaggagcgcgaggcggggtttagatttggagtttgtttttgggagtttttttttggttttggatatgttgtttagagagttggtagtttatttgttgggtaggtgtttgttgtttcgaggtcggcgtcgtttatttcgtatgttagttaaagaattttttagattatcgttatttcggttttttagttggaaggaattgatatggttaaataaggtagcgatcgtattgtatggtagaaataatagtattaacgattatttgttgattgttgattttgggtttagtaaattttttatatgtatttagtttttatatgatgattttttaaggtggtagtatttatttttattttatgaataaggacgttgatgtttagtaagtttaaataatttgtttaggtaataaagtagtggagaatagattttagtttttaatttatatgtttaattagtagttatattgtttttacgtgttttttaggatataataggttgttttaataaagaagaaattggtttgttttaggattttatttagtacgtatgtaattttaaacgttggttattagattagttaattttgtgaggatttttaggcggtattaaatttgtatttacggaaatttattattgttatagttttgtttttttttagtaaggtgttatagaagatatttgaattttaaaattgtattaatttgtgagaaattaagataaatgtgttttttgaaaaaaaatattgtagggtataatagtaattataattgtggagtataaatatttgtagttttagtattattttgtttattaattagttaggattatttttaaaatttataatgaattaagttattgtatttattagagatggagtttgaaatttttaaagattacgtttgttatttggtttttgtcgttaatttttttttatatgtaaaattaaatttttttttgtcgtttttttttatttgaggtttttattaataatgattatattggtcggcgcgatggtttacgtttgtaattttaatattttgggaggtcgaggcgggtggattatttgaggttaggagtttaaaattagtttggttaatatggtgaaattttgtttttattaaaaatataaaaaattagttaggtagggtggcgtatgtttgtaattttagttattggggaggttgagataggagatttgtttgaatttgggagggggaggttgtagtgagttgagattttattattgtattttagtttgggtaacgagtgaaatttcgttttaaaaaaaaaaaataaaaaaatattatattattaatgattaaagagtagttttttatttttttgtttgaatggtgtggtgagaaagaatagaattgaggtatattgcgttttaattatatagttttttgagagtgttttacgtttatgtttgtatttatttaatgtttaagaatgttataattattttattttgtagttttgtatatggtaaattttatagttttatgagtttgtttaatatgtatttaatgaagtatttttaaattatttattttatttatttttattagaataaatgaaattatgtatttgagaggtagtcgttttgattattttatttaggtttttttttatttatgtattatttttgtattttatttatttttatttatttttaaagtttttttagttaaagtgttttggagagttgttatttttattatttatttttttatttgtaatagtttttatttgtgatatttaaaagtagtagcgagatttttattttaagatatagtttaatagtttgatattttttttgtaaaatattttttgttggttttgttttttatttatatattttatatttttatttaaaaagtaagattgtttaggtttttgttattgaaatttattgtttttttaattattttagttttggaaaggaagagaaatggaagtgagaaagttgagtattttttggtagtttttgatagttttggttttgattttgtaaattttgtttgcgttggattttgatttatatagagttttaggggttagtcgaatagttagttaggttgatattaaaaaggtttataagaagttcgttcgggaatggtaggtgaaataaagaaatagaggtttaatataagttaaatagttttagtagggatgaagtttaaattatgattagtttttatttgtttttgtttttatgtttaatatatatatttgtttaaaatattttacgtaggagagttaatgtttatgttttataattgttagcgataagatttaaagtttatgtttattttgaaatttttttttag

SEQ ID NO: 41 - DNA, 17959 bp, Artificial Sequence
  chemically treated genomic DNA (Homo sapiens)
ttagtgggtgatgtttgatatttatttttagtatttagggttggaggggttggatatttttatgtatgtatgtatatacgtgtgtatatatatatgtatatataaagtatttataagataaagtaaatgttagaaaagattattggttatgtgttatttatatgttatatatattttttattttttgtttagttattattggttattttttatttaggtagtagttgtgagaaattaaatgtatttatgttttagaattatggggagaaaataattgttgaatgttttttttgtgtttattatggttttaggtgttgggaatatttagtgggtaagatggattaggtttttttttttatggagttgatattttagttagtggagaaaaataataagttagtagatagataaatgaggaattttagatgaggatagagtgttataaagatagtaagatagagtaggttttttgaaaagttgattttagaataagaagaagttaattacgcgaggatttggaagagatagttttcggtagtggtgttgtaggatttttttgttagtttagttaaaaagagcgtttttgttatataattacgaaagattaggtttatagatattttgaagggtggggaaaatggaatttattaggtaaaaaggaaaaaaaggaaatagggatttttagtaaagtaagagttttgttagtcggtttttcgcgttatagattgaattttagattttattcgggaagaggttaggttttttttttttgtaaagggcgtgaatttttgtggttttattttatttttcggtgtgtaggtagttagagtttttttgcggatttttttatgtttggttgttttagtgggagtggttaatataaagttttaaggggaagaattggtttgttttgttagaggaattttagaaaggttagtgtggttagaggagttaagagggaggagtttataattgggtaggatttttattatgtagggtttggtaggttatgtgtgttaggggttgtatttggttgtttatgaagatattaattataaggattttatttaatagaaatttgttttttatataataaaaaagtttggacgaggagtttatagttttgaagcgtttttatggatttttagatttttatatgtttttgatttttttgttttgttatttttagtttgtgatttttatgtttttgattgttttatagttgcgatatgattgttttatttttggttttttgtttgaatttaaggtggtataaatgatgttattaggaggaaggggtgtttttatattaagaatgtaaattttttttaaaatattttagtagatttttatggttaaaattgtgttatttggttatttttagttataagggaagttgaaaaataaatgttttttttttgcgaagtttattatttttttaatagtattttttttattagaaatgttattgagtagatagattattttatattgtaatgagtagtttggattgtattttagaggagaagttatttgtcgataggtgggaaattaagagttttttgaagatgtaaaattaatttggttgttatattgttaggagtagaatgtatttgaattacgtagtatttaaatataatacgttagtggtagtgaatttgtataggtttgtagtaattttaatttttgtttttttagaaggaagaatttaattgaggggtataaagtagaaagagagattgaggtaattttaaaggaggagtgaaagtttattaaaaagttttagatttggaataaaaggaaagtatatttggaagatggttaagtaggtaattttagagattaagtgtacggtttgatttttgatttagggttttatatattggtatatttttggagttttgtattttttgattttttagggattagttttattttttgattttttttttggggtaggttgtttatatgtatagtgatttgttagcgtttggaaagtgagtaggggtagtgtgtttattggaagtgtatatatgtttatttgaggtaatttttttttattagttttatgtttttagaaggttatatattagttaaacgttgttattttgtttttcgatgtgtggtaaagagattttattaggaagttgttgattattatttttaggttttttttatttattgggagattgtttttttttggtattgattgtaattaattattattttagagaaatagtgtaataattttttgattattatttgatggttatataatatttttggtggtgtgggttgtgggggaagagtttttttttgttttgtttaggtcgattagttatttattgtaagataattagagttttttaattagtataaatttggagaataggttataggtaaagagatataatttgttagattttagggtagtttaggggttattagggtttttttggagttttgtttttttttgtgaaggtttttttttttattttttagggttttttattaatagtatttgttattgagtttaagatgttgtggttcgtaatatgtaattttgttttaggtattattaagggtaaaaatattattaattaaatgatattataatgtgtttttttaatttaaaatttttattttatatttttaagaaataattttttaggtttaagatatacgatataagtttttaattatatagtatttttgtatatatataaaaaggaagttatttatgaaattaattagttaggtatttttaaatttttaagaacgtgagtgatgtgttatttttttaaagagtaatttagtattaattttaggatttttttttaaattgttggtatttatttggaagtttggatgtgaatgtaagataatggtaagtatattatgattgtagtttggttaataattattttattatcggtgttgaaatgtgtgtatggagtggggaatgtaagattaatgtatgttatgtgtatttttatgtgtgttttgatgtatagagttgcgtagtattgagttagataataaatagagaagttaaggtggcggtggtgagtttggagtttagtggaggggtagaaagagagaaattaagttgtagatgtggtatttataagcgtttgtaggtggtggtggtggtgagtttggagtttaggggaggagtagaaatagagaaatgaggttgtagatttggtatttgtaagtatttgtatgatagtcgtttataggttgtatgtgattatttatgggaagtttagatagagaagaaggttaatgttgagttttgcgatatttaaatgtttataaatttagaagagggcgaattgttaagttgatagagtgagtagttagggtggttagagaattggagggtaaggtagtgatgtggtattttcggagtaaaggaggagggggacggttagttgtattaagtgttgttaagagtttaaatagaatgaaagtagaaaatgattattggatttggtagtatataggttataagtgatttttataaaaggattttttatggttgagggtagtgtagtagaatttgatgaaaattagataaattggattggagggagtgataagagatgaggagtttagtttttttgaatagttttgttgttaaagggaaaagtatagttaagcgaggggtggtgtttttttcgttaaagagattaggtttgtttgaatgcgaatttagtaaggtattgcggaagttaatagtagttgtaaaatattggggtaggcgggaagaatacgatttaaggtacgagagttaggggttagttacggtaataggaagatgatggtgaaaattaaaagtttttgagagtggttttaatttaggaagtttattttgttaaggttaaggacgtgtattgatataattttaggaggttttgatgatatgtgtttagggtggttaggaaatattttggttttatatatttgagggagatatgagatattaattaatacgtaagatgtaggttggttttttaggaggtaaaatgtgaagtggaggcgttcgggttataggtatatttaaaggttttttgattggtaattggttgagagttattatttaaagatttggatttagtagaagggaatgttcgggttgtatgaaggagttgtggagattaaggtgttattatgtagatgaagtcgggaatatattgtaaatgttttttattagagttttttattagttttagggttttcgtgcggatgtttgtgaggttatgtttgattttcgttttttattaaggtttgaattagttttttaagataatttagaaggttataggcggaggggagggtttattcgttggttgtagggtttagaattttatttttggtttataacgaggagggtagggatagaagttatcgtttttgttttttagcgttggtttttattcggaaagtaggtttttttttcgtatcgttttttaataaatttttgttttttcggttttcgtcgttgttatttgggttttttttttcgcgttttattaggcgttgtcgcggtaggggttgagggttttaggggacggtcgtttttttgtcgggacgtttcggttttggttcgtattgtggggcgtagttatttagtcgtcgtcgcgtagttaggagttcggttgagcgcgttcgttgtaggagttatttttagttgggttttatttaatttttcgtaattttagttttcgtagttagtcggggatttcgttttttttttttttttttttttttttatttttttattttttttttttttttttttttttcgttttcgttttcgttttcgttttcgttttcggttatagtattcgacgtggcgcggtcggttgcgtacgtatcgtatgtttggtttcgcggtttagtagggcgggcgggtcgcggtgacgttagtgcgtatgtcgtcggtgggttcggttgcgttacgtcggcgcgcggcggtcgcgtttttttaacggtagtggtatttattcggttcgcgcggtttcggcgttttacgcgcgcgcgtcgttttttcgttcgttcgtttttcggcgtttatatttgagtttattcgcgtacgttcgttcggttcgagaatcgcgtcgtcgtttcggtttcgcggaagtttcgtcgcgttatgttttcgtttttcgaagggaaattagagattaaagttggatattcgttcgtcggtattgattttttttttttttttttacgcgcgggtgtcgggggcgggttcgaattcgggggcgtcgggcgggggtttcgcggggagggtttcggcgagcgttgagacgggtttcgggttttgatgttcgttcgaggggcgcgggtcgcggagaggtcgggcgtttaggttcgggaggagttcgtcggagtttcggtttcgtttgtcggcggcggcgaagcgtttttttttgaggatcgcgggcggtcgcgtatttgtgcgattgcgcgtaggtttcggtgttttgggcgaatttagttgtataatttataataaagttttggcggataatatttatttagaggatatagatgtttagaaagaaagtagtagaagtaatgaaaagttagtggtgttaatattatggtgatgattaattagaggttgttagcgttttatatcgatttaagaattaaggagcggaaataatttttattattaattatttaatatgatttttatcgttagttttttttatatttagatttttttttttttttaaagttgttttttttgattttgagtaaattttaaatttttgagttaaggaagttaaagttaggaaagagcggttttttttagaatatagggatttaagtagtttttatgtttttgttatttttttttttttttgggtatagtttttgtttgtattttggattttgtttagacgggtttgttttcgtttttatttttttttttagtggtagtcggtttatatggagggatattggtgagaagattaaaggttttgggttttagaagttaagttattttaatgtatggatgcgtgaggtttttttaggttttaatagtacgttttagtgttataaatttagttttgtaggaatagaagtttttgagaaatatggttttttttggtggtatatttgcgttatttttttgataataaagatttttggttaggcgcggtggtttatgtttgtaattttagtagtttgggaggttaaggagggtggattatttgaggttaggagtttaagattagtttggataatatggtgaaattttatttttattaaaagtagaaaaattagttgggtatggtggcgggcgtttgtaattttagttatttaggaggtcgaggtaggagaatggtttgaattcgggaggtagaagttgtagtgagttaagattgagttaaagtattttagttttggcgataaagcgagcgagattttattttaaaaaaaaaaaaaaaaaaaaaaaagatttttattatttttttttgttgtttttcgttatagggcgggaattttttgtattagtataatgaataggagtcgttttttaaatatgttgtagtttagagtaggtaatattttttagtggtgacggaggttttttataataaaattaattggtattgggaaagaaaaatgtttaattgatgttagagaatttaagaggtatggggttttagaaaattattttattgtgatggaaaatggttttgggggaatttgtgttgtattggttttaagaaaaaaagtattttaaagggagttttttttttgatgggattttttttaaggataattgatttttattttattatagcgggtttttgtttattgtggggaggagcgttttgatttttatttcgggtagggttgtttttaggaattgtagtagttatttgttttggttttttattttttaggatatgggttatattaaagcgtatttgttggaatgatatagaattaaagtatagtaattaaattgtatatagagatatatttataaagaagttttttgttttgttttttgaaatagagttttattttgttatttgggagtgtagtggtacgattttggtttattgtaattttcgttttttaggtttaagagatttttttgttttagtttttcgagtagttgggtttataggtgtttgttattatatttggttgatttttgtatttttagtagagatcggattttgttatgttggttaggttggttttgaatttttgattttaggtgatttatttattttagttttttaaagtgtttatatggagatttttaaggttagaggtataaattgtatatatttattttttgggagaaattttttgttggattttggttttttttgaattgtagagtaaatagttaggttttgtgaattatagagtaagtagtttatttatttttgaggagggaagaggtagtttatttgtgttagtgtagtagtgagtttgggttttaagtttgaagatattattttacgttttattggggtttagttttttttttttatgaaattcgaggtttgggtttcggggtaagttatagggtggggttgtgtttgttgtagtgagttttacgtttcgttttagtattagggtattagtattgtttattttttaggtaaatttttttagtaattttagggtaatttttttagatttacggggtgagtttttgcgggtggttgttattatttgttatttgtttttaagattatagttagaggaggggtttaatagtagtattttttaaatgttagtagtattttttaaatgttaatagtattttttaaatgttaatagtattttttaaatgttaatagtattttttagatgttaatagtattttttaaatgcgtttttttagatgttatagaggattatgtgtgaattttttttggtaggaagttttggtgtttttgtttagtttggtattgttagagagtaggtagttttgaagggtagatagtttttaaaaaaaaaaaaaaaaggcggtttattatattaaaggataattattaaggatagttaagagtatagtttataaattaaaattattgttttaaaaatgttgagaatgtttttattaagtgtttaaattggataatagatttgtgttttaatgtttaattagaaataataaaatttttttatagtgattattttaatgtttttttgtgttttttttttgttgttgtttggtttatattttttgtatatttttcgtaatttttttgttttttttcgtgtattaattttcgtttttttgtttgtttttttgtttttagggttgggtttttttgatttttttattttcggggtggtataaaatatttaataagtattttagagtttttttagggtttttttttattttttattgtttttatagtaaatcgggtttatattttttttaattttgagttttttgtattgtgcgtagggatgtaggtggtttttttggtcggtttaggtagtagattggtggaaatattaatgaagtttgttgagtgttataatgtgttgatatatttttaagcgtttggtacgtttaatttatgaaattattagttattttaatattgagatatcgaggatagtgtcgtttaaaaatttgatttagagtcgggtgtcgtggtttacgtttataattttagtattttgggagatttaggtggggagagtatttgagtttaggagtttaagattagtttggttaatatggtgaaatttcgtttttattaaaaatataaaattagtcgggtgtgttggtgggtgtttgtaattttagttattttgtaggttgaggtaggaaaatcgtttgaatttgggaggtagaggttgtggtgagttaggattatattattggattttagtttgggtaagaagagcgaatatttcgtttaaaaaaaaaaaatttgatttaattgtttggagtgtttgttgttaatttttttgagttagtgatttagtgggagcggtcggaaaggttgttgttttttggaattttagtagttcgatagacgattttattattggttaggtgtttttttttaaggtgggagacgaatgaggtagtttgtaaaggtttttgaagagtgttagagaaaggtgttgtgtaaatataggtattgttatttataagtgatggatggtattgtattatgttttggtaaatgtgttgtcgtttgtagttttttgtagaagtaatttagttttaatgatttgagattttattattgtttttgattataaaatatttgtagagaaatggggtgagtgtttgtttgatgagttattgtaaatgtagattagtagagttagaattagcgagattttttttgttttatttaatagtagttatagtattttatagtagaaaagaggatttaattataagtttcgttattatttatttttgttagtttttgtgagtttgtggtagtgagatgtgtaaaatttttttgttaaatatattttgttggttttgtttttttttattttttagtggagttaaaattatgtgttagtagagtttttataaatttgttatatgatagttttgaatgttattaattttatatgtggttttttttgaaaagtagattttatatttttttttaaagtgaattaaatggaaatataagtacgattatatttattttaagttatgttattttttttagtaattttagagtaatttagtttttttttatattaattgatacgttagatatgagttaaggatgttttttaaaagtttagtgtaattttttttgaattatttttttgtagaaagatttttagattatttattgttagaaatagaagattaatttgttttttattaattttgtggttatagatttgttaagtatagttttagtgttaattagttaggattagaaattgaatggtttaggtaagaggtttgtttttgtttttaatatgttaaggaaaataagattttttagttattatttttttttagaagttttttgttaaggtggtttatggtattttattttttttttagtttttttttgttgtttttgtttagatagggttttttttaggtttgagtgtagtggcgtgattttggtttattgtaattttggttttttgggtttaagagattttttcgttttagtgtgttgagtagttgggattataggtgtgtattattataattagttaatttgtgtattttgtgtagatataaggttttattatgttgtttagttaggttttaaatttttgggtttaagcgatttgtttattttggttttttaaagtgttgggattttaggtatgagttatcgtatttagttttttttagttatttttggttatttgtgatttttaacgtttttgtgagtgttttttttatttcggttagtgttttgtgtatttttatttggttttgtgattgtttttttttttttagttttagaagttttttttgtttttatagagaatgtttatttttgtataaagtattatattaggtatagagaatggtattttttgttgtaataaataatttaaatttttagtggttaaattaatttaggtttattttttttttgggtggggtttttttaataaagagtaatttagaggtttagatattttttgttgtataatattagttttttattgtgtggttgttgttgaggggataagtgtaggtcgtcgtgttggggttcgtatggtgtggtttataagtggtatgtattattatattagttttttatggttgttgtattaaattataataaatttagtggttttaaataatatagttttattatgttatagttttagaggtgagaagtttaagatgggttttattgggttaaaattaaagtatttatagggtaattggttttttttggaggatcggggagaattttatttttttgttttttttagtttttagaggttgtttattttttttggttcgtggcgtttttttttataagttaaggaaagtttttttaaaggtagtaatgattagttatatttttatattatatatttagagttttgattttttcgttttttttttttatatttagagatttttgagattatatgggtttatttgggtaatttagaataatttttttatttttagtttatgattttaagtatagaatagtagttttttttttttttttttagtttatagttagttgatgagtaattttaattttatttataatttttattttttttggtcgtgtagtttagtatatttataggttttagagtggggggacgtgatgatatgatgttgtttattaaagttatttttttttatattattgggtaggatttagtttgatgtttttaatttaattacggggaagttgggagtgagattggtaaatatttgattagttttagttttaattaatttttaatgatagtttttttaaagtatttttaggtagtcgattttatttttttttaaattttttgaattagtttttttgtatttaaggatatatatgtagttgttttatgtattttttagtttgaaaggggtttagttagatgttcggtaaggtgtttattttggtttagttagtatttattttgttttttgggttagaaattatgttaaggatggaatatatattgttgtggaagatggagtgtttggtttaggggggttttattatgtttttgaattttattttttaatagggttgtttcgtgtaatttaagagtttttttatttttatagtttatgattttgagtatagaatagtagtatgaagttaacgagagtgtaaatttaggaaagtatttggggttttagtttattttttagtataaattattatttttattttatttatgtatatttgaaagtttttgtaagggttttatttggtttgggggtaaggtttttattggggttttttataatttatgtttgttattgggttagattgttagtatttattttttgtatacgtttttatcgttttttatttttttattttttttattttttagggtttttatttttaggtgtatgggtttttatagatgtgagtttttatttgttagtgattttttttttttttggtggagttattttttttaattaagataggttatagttttttgttttgttcgtattgggaagttttatttatttaattttattagtttttttgtttatttgttattatattgttttatttgagattttttggtttaattataatttgtagtattggttgttttttgttttgttttgttttttttattggaatagtttttagaatttttcgttattttttttaggtagaagagtttttttttgaataatatttttatagttttttttaggtaagaataaaggtagtatatatttgtgagttatattttagtatttgtagtggatgtttttgggatatttgtgtgagttaatagttttttttagttttttgttggaaattgttttttggtttatggaatttttttagtattttttttttttttttttcgtagtagtattttttagtttgttatttggtattagtagatagtaagttattagtgattgtattttatagttaggtattttgatatttgaggacggatgtttggtttagggttttatatagttatttgtttttttggtgtttgtttattttttagatgtgatcgtaggtaaagttttttttatttttttttttatttgggtaggtagttgttttgtggagagttttttattttaaatttatttttttttatttaggtagtgtaataatttggttttgtttgtaggtcgtttttttgagttatttttagaagttatggtgttttgttttttggaaggaatttgattaaggaaaggtttatttacgattaagggtggaatttagtttgtcgtttgttagttgtgcgatttggggtcgttggtttttttttttttttgttttaggatttatttcgtggggttgttgtgtagtgaaagatgcgtggattttaagtggttagagcggtgtttgttatagagtggtgatgaggagtagaagttggatttgtgatttttttaaagtttttttaggtggtgatgtaatgacggaggttttggtggtggttagtattacgatgggtaggtgttttatagggtatggtttttattttttagtaattcgtagggtagcgttttttaaggaattgttgtgaagagagggtgaagagttggaaaagtattaacgatttgaggattttagaggttttttttgagtattaaatgttaatttaaaaatttatttaataagattagttaatagttgagtatattttgtgtgttaggttttgttggaggtattttatgtgttttaatttatgtaatttttagttggttttgggagaggggaatatttttattttttttttataggtggtagattttgaggtatagagagttttagtaatttgtttatatatagttatatatataagtatatacgtatgtatatatgtgtatatatttatgtataggtatatgtatatatatatatatataggtagaattgggatttgattttaaggttttggttttagtatttgtgtttttattttttgtatagtatttttgttaagaggaagtttattttttatatttgaagtttttatttgaataataattattacgataaaaatttaaggtttttttgttttttttaaaaatattgatttgtaaataattttgtaaagatttttgtaaaagtaattttttttttgtagttttataaatgaagagttttagagatagtgatataataattataataaatatgtgttgttatattttttggtagtattgtaagttaaaatgaatttgttttagttttgagttattattgttattattgttattttttattgttatattaattattaaatataattgagagggattaatgaagttaattgtttttagaaattaaattaaatgtaagtgttaatgttgggtgattgagttttgatattgtgtgtttattttagtagaggagcggataggttgttttgtaggagttttagaagatttgattattttaaatgttattttaatatttattattagttttttttatagttagttgtatagttttttttatttttattttatgaatatatttgtgagttatagtttaaaagttttatgtgtgttaagttggaaagatttagagattatttttaaatgggtatttgtattgttggtttggtttgttttaataaaatattatagattgggtggtttaaattatagatatttattttttttagtttgggaggttgaagtttaagattaaggtgttggtagttttgtttttttttgagattttttttttgggtttgtagatggtatttttttgttgtttttttgtaggttatttttttgtgtgtgtacgattcggtgttttttttttttatagagatattatttttattatattagagttttattttaattttttattttaatttaattgttttttaagattttttttttaaatataattataatttaagggtatgttagttaggattttaatttatgaattttggggggatattatttagttcgtaatagtattttttattaatttttgatgagtatgggaaagaggtgggatagagtagggagggaaatgaatttttaaaaaatatttagtgggatagtttttttaagtttttttttgagttcgaaatatttataattttgagattttgtgttttaagagagtggaaaatgattttaaggtgtaggtagataattgtatttttagtttttatttttgattgggaggttaattacgtaggttgggaaatttttttaattttagattaaaaagttgtttgtaaatggtaggttttttttgttttgtttttggttttttgtttttttaaaagaatttgattttgaagtgaaaggaatttttggaaatttaaaacgaagaaggaattgaaatttagatttttagtatgagaggtgggtttataggaggtagggagtagttaaggttggatgtttagaggttatatttttggggaaaggtggaagagggaaatttgtttagtggttttaggagggttaggaagtcggattgtgttaggttgggttttatatggggatagaggtttttttgagaatttgtaaataaaggtttgtttttatatgagtttagttcgtatttgtattgtttggtaatttgttttttgagaaatttgttttgaaaaggatttttagatatttatatttttggtttgataaaaatacgtgtagtatttttttagagggttgttgtttgtattataggttttatgagatttttattggtaaagtttagtgaagatagattttttttttaagttttttaggataagagtaagaatttataggtaaaaatagatagtaggattagattttagaggattttagaaaattaaataattggatatataattaaaatgattaaatatataaaggaattgaacgtataagaaaagaataagattttattaaatatttggtgaatttgagataaaagttgtaggaatgaaaaatagagtgattaaaaattaattgatgggatatagagtagatttttgagaggattattgaataggattttgtttttttttgttttaagtagaatgtttttttcgttgagaagaggtgcgggtagtagggagattttagttttaaatttaagttagaggaaatagtcgttattttttttgtttttttttgtttttttttaatagttagttgttggggtagtgttggttttgggagtaaacgttattatttttttttagtcgggttggttaagttttttagggaaattgaagattagtatatttgaagtatgtaagttttaggttgttttttttattttttttttcgtttattagtagtataaagaaagttggtttgggttttcgtgattcggtagggtttatttagtttaaaatgttagaggatatggtgtggtaagttgattgtatcgtgatgttagtcgttttgtggtagagatttagagatttgaagggtaaagtttagtaaggtttatatttagagtttggggggttaatgattataaggaaaatgattttgttttttagttagtattttattttttcgaacgtttttttttttttaatagtttgaggaggtttattttttttttgtagatgaagtagggaatttttgagaatttgagatattagtttgagattatatagttgagggcgtggaggaacgtgtcgattttaaatatatgttggtggttattatgcgaggttggttttttggatttagggttagttagtatttttaaattttgtttatggaatattgtagttttgatggaggataattggtattatagttaaaaaaaaaaaaaaaaaaaaagttgtgtggttagataggttggggagagttggtaagttgtatgttttttgtaagttttttttatgtaggtagtatattaagggttaagaaggttttttttggggaaatttatttaattttgtttaatttggtattttttatttttaatagatgttagattattcgattttttataatatagtattaatatattagttataaaggaattgtatattaaattataataagagattattttatatttattaggatggttataattaaaaagatatataatagtaagtgtcgggaatatgtggagaattggaatttatatattggtgggaatgtgaaatagtgtggaggttttggaagatagtttggtggtttttagaaggataaatttagaggtattatgtggtttggtagttttatttttcggtatatatttaaggaaatgaaaatatatgtttatataaaaatttacgtgtaagttttttatagttgtattgtttataatagttaaaaaagtagaaataacgtaaatgtttaattgatgagtggagagatataatgtgatatatttatgtaatagaatatttgataagaagaggaatgagatatttatacgtgttgtaatatggatgaattttgaaaatacgttaagtgtaaggagttagttattaaaggttatatagtttataattttatttatattatatgttcgaaataagtaagtttaggtgattggtttttaggagttgggaggggtggaatggagggtaattgtttatggttgtggggtttttgtttggggtgatgaaaattttttaaaattgattatggtaatggttgtataattttgaatgtatttaaaattatcgaattatatagtttaaatgaatgaattgtattttatatgaattatatatttataaagttgttttttaaaattaagttaatatttgttagcggtagggttttatagtatagtttgggtaaagttgtagtagaagttttgttgttatttgtttgggttttgtgaaggtatagtagttgttttatgttatttattattatattattttattaaaaatattttcgatatttgagaaagtaaattttataggggagggttgaggtgagtttttgtgttgagattgtggagaattgaaagtagtagttattttttttgtgtagtttgtgttttcgttatattgttgttttgataaaatatttgaaaggtgattagatagaaaaataagagttttggaaagtttttgagtggatttgtagtaagagattatgttgagtgttgtattattttgaatttatttcgataattttgattttttttagttaattatttttattgttagattttttagattgatttgtggttattgagtaattagaatttttttagttggtttttttgatttataggtagttttatttttatattaattttatattttttgtttttattttagt

SEQ ID NO: 42 - DNA, 17959 bp, Artificial Sequence
  chemically treated genomic DNA (Homo sapiens)
attgaaatgaaaatagagagtgtgggattaatgtggaaatggggttgtttgtggattagggggattagttggaaaggttttggttgtttagtggttataagttagtttggagaatttggtaatgaaaatgattaattagggaaggttagggttgtcggggtaaatttaaaatgatatagtatttaatataattttttattatagatttatttagaaattttttaaggtttttgtttttttatttggttattttttaagtattttgttagagtagtagtgtaacgagggtataaattatataaagagagtggttgttgtttttagttttttatagttttaatataagagtttattttaatttttttttgtgaaatttatttttttaaatatcgaagatgtttttgatggggtgatatggtgatgggtgatatgggatagttattgtgtttttatagagtttaggtaagtggtaataaaatttttattgtagttttgtttaaattgtgttgtgaaattttatcgttggtagatgttaatttagttttaaaaaatagttttatagatatgtaatttatgtagaatataatttatttatttaaattgtataattcgatggttttgagtgtatttagaattgtataattattgttataattaattttaggagatttttattattttaaatagaaattttatagttatgaatagttattttttattttattttttttagtttttggaagttagttatttggatttgtttatttcggatatgtgatataagtggaattataaattatgtggtttttggtgattggttttttgtatttagcgtgtttttaaggtttatttatgttatagtacgtgtaagtattttatttttttttttgttaaatattttattgtatggatgtattatattgtatttttttatttattaattagatatttgcgttgtttttatttttttggttattatgaataatgtagttgtgaagaatttatacgtaagtttttgtatggatatatgtttttatttttttgagtatatatcgagaaatggaattgttaggttatatggtgtttttgaatttatttttttgaaaattattaagttgttttttaaagtttttatattattttatatttttattagtgtgtgggttttaattttttatatgttttcgatatttattattgtgtgtttttttaattatagttattttagtgggtgtgaagtggttttttattgtggtttgatgtgtaatttttttatggttaatatgttaatattgtgttgtaaggggtcgggtaatttagtatttattaagagtgggaaatgttaggttgaataaaattaaataggtttttttaagagagatttttttggtttttagtgtgttatttgtatgaggaagatttataggaggtatatagtttgttagttttttttagtttatttgattatataattttttttttttttttttttttggttataatattagttattttttattagggttatagtgttttatgaatagaatttggaaatgttggttggttttaaatttaaaaagttagtttcgtatggtagttattagtatgtgtttggggtcggtacgtttttttacgtttttagttatgtggttttagattagtgttttagatttttaaagattttttgttttatttgtagaaaggagataaatttttttagattattaagaagagagaggcgttcgggagagtggggtgttggttagaaagtagggttattttttttgtagttattggttttttaggttttggatgtgggttttattgagttttattttttaagtttttgagtttttgttataagacggttaatattacgatatagttaatttgttatattatgttttttggtattttaaattgagtggattttgtcgagttacgaaaatttaggttaattttttttatgttgttgatgaacgggaaggagaatgggagaggtagtttggggtttatatgttttaggtgtattggtttttaatttttttgggagatttggttagttcgattggagggagatggtgacgtttgtttttaggattagtattgttttagtagttggttgttagaaaagggtaaaagagagtaaggaaaatgacgattattttttttggtttgggtttagaattaaaatttttttgttgttcgtatttttttttaacggagaggatattttatttggggtagaaggaaatagaattttgtttagtaatttttttaaaaatttgttttatattttattaattgatttttaattattttattttttatttttatagtttttgttttaaatttattaggtatttgatggggttttattttttttttgtgcgtttaatttttttatatatttaattattttagttgtatatttaattatttgattttttgaagttttttggagtttaattttgttgtttgtttttgtttgtggatttttgtttttgttttgggagatttggaggaggaatttgtttttattgggttttattagtaaggattttatggggtttgtgatgtagatagtaattttttggggagatgttatacgtgtttttgttaggttaggagtataggtgtttgaaaattttttttaaggtagattttttagaagataaattgttaaatagtataaatacgaattgaatttatgtaaaagtaagtttttgtttataaatttttaaggagatttttgtttttatgtggagtttagtttgatatagttcggttttttggtttttttagggttattgggtaggttttttttttttatttttttttaggggtgtggtttttgagtatttaattttggttattttttgttttttgtgggtttattttttatgttaaaggtttgaattttagtttttttttcgttttgggtttttaggaattttttttattttaaggttaaatttttttaaaaaagtaaaaagttaaagataaaatagaaaagatttattatttgtaggtagttttttaatttaagattaaaaagattttttagtttacgtagttggttttttaattagaaatggagattgaaaatataattatttatttatattttagggttattttttatttttttgaaatataggattttagagttatgaatgtttcgggtttaaggaagagtttagaagaattgttttattaaatattttttaaaaatttatttttttttttgttttattttattttttttttatgtttattagaaattgatgaaagatgttattacgggttgaatagtgtttttttaaaatttataggttgaagttttaattgatatatttttaaattgtaattgtatttggagagagggttttaaaagataattaagttaaaatgaggaattgaggtagggttttaatataatagaaatggtgtttttataagagaaagagatatcgggtcgtgtatatataaagaaatggtttgtaaggaaatagtaagaaagtgttatttgtaagtttaggagagaggttttaggagaaagtagagttgttaatattttgattttggattttagttttttaagttgggagaaataaatgtttatggtttaagttatttagtttgtggtattttgttaaggtaggttaaattaataatatagatgtttatttaaaaatgatttttgaatttttttaatttggtatatataaaatttttaaattgtaatttatagatgtgtttataaagtaaaaataaaaagagttgtgtaattaattataaagaaaattaatgatgaatgttaaggtgatatttgaaatgattaagttttttgaagtttttgtagggtagtttgttcgtttttttgttgaaataagtatatagtgttaaggtttagttatttagtattagtatttgtatttaatttagtttttaaaaataattaattttattaattttttttagttatgtttggtgattaatgtagtaataaaaagtggtaataataataataataatttaaagttgagatagatttattttaatttataatattgttaaaaaatatgatagtatatatttattgtgattgttgtattattgtttttagaattttttatttgtaaaattataaaagaagaattatttttgtagaaatttttgtagaattatttgtaaattagtatttttaggagaaatagaaaaattttagatttttgtcgtggtggttgttatttaaatgagagttttaaatgtaaaaaataagtttttttttagtagaagtgttgtgtagaggataagaatatagatgttggagttagaattttgggattaaattttagttttgtttgtgtgtgtgtgtgtgtgtatgtgtttgtgtataagtgtgtgtatatgtgtgtatacgtatgtgtttgtgtgtgtggttgtgtgtgggtaagttgttgaagttttttgtgttttagggtttgttatttatgaagaaagagtgaaaatgttttttttttttagggttagttgaggattatatgagttaggatatatgaaatgtttttaataggatttggtatataggatgtgtttaattgttagttagttttattaaatgggtttttaagttagtatttagtatttaagagaggtttttggagtttttaaatcgttggtgtttttttagttttttattttttttttatagtagttttttaaagagcgttgttttacgggttgttggggaatgaaggttatgttttgtaaagtatttgtttatcgtggtgttgattattattaggattttcgttattatattattatttgaggaagttttgggagaattatagatttaatttttgttttttattattattttgtggtaggtatcgttttaattatttggagtttacgtattttttattgtatagtagttttacggagtagattttgaggtagggagaaggggaagttagcggttttaaatcgtatagttggtaagcggtaaattgggttttatttttaatcgtaggtaagtttttttttgattagattttttttaggaagtagagtattatggtttttgagagtaatttaaaggaacggtttatagatagggttaggttattatattatttagataagggaaggtgagtttgaaatgaaaagttttttatagagtagttgtttgtttaagtgggaaggggagtggaggaagttttatttacggttatatttgggaggtaagtaaatattaaggaggtaaatgattatgtgggattttgggttaagtattcgtttttaggtgttaggatgtttggttgtaagatgtagttattggtggtttgttatttgttagtgttaaatagtaaattagaaaatgttattgcgggaagaagaaaggggaaatattggaagagttttatgaattagggagtaatttttagtagggagttaggaagggttgttaatttatataaatgttttaaaagtatttattgtaggtattggagtatgatttataagtatatgttatttttgtttttgtttgagaagagttatggaaatgttatttaaagggaagtttttttatttaaaagaagtgacgaaaggttttgaggattgttttagtggaaggaataaaataaaatagaaaataattagtgttgtaggttatgattaaattaaaggattttaggtagagtaatgtagtggtaggtaagtaaaggggttggtgagattaggtgggtagaattttttaatgcgaatagggtaagggattatggtttattttagttaagaaaaatgattttattaggagagaggagaattattggtaagtggagatttatatttatggaagtttatgtatttgaaggtgggaattttaaaaagtggagaggataaaggggtgagaggcggtaagaacgtatgtagagagtgggtattgatagtttggtttaataatagatataagttatagaagattttaatgagaattttgtttttagattaagtggagtttttataggagtttttaggtgtgtatagataaggtagaagtaatggtttgtgttaaaaaatgagttggagttttagatatttttttgaatttgtattttcgttggttttatattgttattttgtgtttagaattatagattgtgaaggtgagaaggtttttaaattatacggagtaattttgttaaagaatgaagtttagagatatagtgggatttttttgggttaaatattttattttttatagtagtgtgtgttttatttttgatatagtttttgatttaaaggataaaatgagtattgattgggttaggatgggtattttgtcggatatttgattgggttttttttaagttgggaggtatatggagtagttatatgtatatttttgagtgtagggaggttgatttaaaaagtttaggggaaagtaggatcggttgtttggaagtgttttggaaaagttgttattgggaattggttgaggttaggattagttaggtgtttgttagttttatttttagttttttcgtagttggattgggggtattaaattgggttttgtttaatagtatggggaaaagtgattttggtgggtagtattatgttattacgtttttttattttggaatttgtgagtgtgttgggttatacggttaggggaaatgagggttgtagatggaattaaggttgtttattagttgattgtaagttgaggaagaagaagggaaattgttattttgtgtttagaattatagattgaaggtgaggagattattttggattatttaggtgggtttatgtaattttaagggtttttgaatgtgaaagagggaggcggaagagttagggttttgagtgtgtgatgtgaggatgtgattggttattgttgtttttgaagaagttttttttggtttgtggaggaaggcgttacgagttaaggaaagtgggtagtttttagaagttggaaaaggtaagaaaatgggatttttttcgattttttagaaggaattagttgttttgtggatattttgattttagtttagtgagatttattttggattttttatttttagaattgtaatataataaaattgtgttgtttagaattattaagtttattgtgatttggtatagtagttataggaaattgatgtgatgatgtatattatttgtgggttatattatacggattttagtacggcgatttatatttgtttttttagtagtagttatataatgaaaagttagtgttatatagtaaggggtgtttgggtttttgaattgttttttgttaagaagattttatttaggagagaaataaatttggattagtttggttattgagaatttaggttgtttgttataataggaagtattattttttatatttaatatagtattttatataaaagtgaatattttttatagaaataaaaaaaatttttgaagttgggaagggaaaagtagttataaaattaagtaagaatgtatagggtattggtcgaaatgaaaaggatatttataaagacgttagaagttatagataattaaaaatggttagggaaggttgggtgcggtggtttatgtttggagttttaatattttgggaggttaaggtgggtaggtcgtttgagtttaggagtttgagatttgattggataatatagtaaaattttgtgtttatataaaatatataaattagttggttgtggtggtgtatatttgtagttttagttatttagtatattgaggcgagaagattttttgagtttaggaggttaaggttgtagtgagttaagattacgttattgtatttaagtttgagagagattttgtttagataagaataataaaaaaaggttagggaagaggtgaaatgttatgggttattttgatagaaggtttttgaaaaaagatagtaattaaagggttttgttttttttggtatgttgggaataagggtagattttttatttggattatttaatttttggttttgattggttgatattgggattatgtttagtaaatttgtgattatagggttaatagaagataaattagttttttgtttttagtaatggataatttgaaagtttttttgtagggagataatttagggagaattatattagatttttgaaaggtatttttaatttatgtttgacgtattaattagtgtaagagagaattaagttattttgaagttattaaaaaaagtaatatggtttgaaataaatataatcgtgtttatatttttatttaatttattttgagaggggatgtagagtttgttttttaaagaaaattatatgtaagattagtaatatttaaagttattatgtagtagatttatgagaattttattgatatatggttttggttttattgggaaatggaggggaatagggttagtaaaatgtatttaataaagagattttatatattttattgttatagatttataaagattggtagaaatgagtaatagcgaggtttataattaggtttttttttttgttgtggaatgttatgattgttgttagatgaaatagaaagaatttcgttaattttaattttgttaatttgtatttgtaataatttattaaataagtatttattttatttttttgtaaatattttgtagttaagagtagtggtaaggttttaaattattaaggttggattatttttatagaggattgtagacgatagtatatttgttaggatatgatgtagtgttatttattatttgtaaataataatatttgtatttgtatagtatttttttttaatattttttagaagtttttataaattgttttattcgttttttattttgggaggaggtatttggttagtgatggagtcgtttgtcgggttgttgaagttttaaaaggtaatagttttttcggtcgtttttattaggttattagtttaggggagttggtaatagatattttaaataattgggttaggttttttttttttagacgaaatattcgttttttttgtttaggttggagtttagtggtgtgattttggtttattataatttttgttttttaggtttaagcgatttttttgttttagtttatagagtagttgagattataggtatttattagtatattcgattaattttgtatttttggtagagacggggttttattatgttggttaggttagttttgaatttttgagtttaggtgttttttttatttgggttttttaaagtgttgggattataggcgtgagttacgatattcggttttgggttaggtttttaaacggtattgttttcggtattttaatgttaagatgattggtgattttatgagttaaacgtgttaagcgtttagaagtgtgttagtatattgtgatatttaataaattttattagtgtttttattagtttgttgtttgaatcggttaagaggattatttgtatttttgcgtatagtatagagagtttagagttgaggaaggtgtgggttcggtttgttatgggggtagtgaggggtgagaagaggttttggggaaattttggagtgtttattgagtattttgtgttatttcgggaataaagagattaagaagatttagttttggaagtaagaagataggtagagaggcgaaggttagtgtacgaaggaaaataaggggattgcggggaatgtataggagatatgggttagatagtaataaagagaagatataaaagaatattaagatagttattgtaagagaattttattatttttgattgagtattgaggtataagtttgttatttaatttaagtatttaatgaaagtatttttaatatttttaaggtagtgattttgatttatgaattgtgtttttggttatttttgatgattattttttagtgtagtgggtcgttttttttttttttttttaaaaattatttattttttagagttgtttattttttggtaatgttagattaaataagaatattagagttttttgttagaaaaggtttatatatggttttttgtaatatttaggaaagcgtatttgaggggtgttgttggtatttgaggggtgttgttggtatttgaggggtgttgttggtatttgaggggtgttgttggtatttgagggatgttgttggtatttgaggggtgttgttattgggttttttttttaattatggttttggagatagatgatagatggtgatagttattcgtaagagtttatttcgtaagtttaaaggggttgttttgaagttattagaggagtttatttgggggatgaatagtgttggtattttgatgttgaagcgggacgtgagatttattgtagtaaatatagttttattttgtgatttgtttcgaggtttaaatttcgaattttataaaggagaaaaattgagttttagtgaagcgtgaagtgatgtttttaaatttagaatttaagtttattgttatattagtataaataagttgttttttttttttttaggggtaaataaattatttattttgtaatttataaagtttagttgtttattttgtaatttaaagaaaattagagtttagtaaggaattttttttagggagtgagtatgtatagtttatatttttgattttaaaaatttttatatgggtattttggaaggttgaggtgggtggattatttgaagttaggagtttaagattagtttggttaatatggtaaaattcggtttttattaaaaatataaaaattagttaggtgtggtggtaggtatttgtaaatttagttattcgggaggttgaggtaggagaattttttgaatttagaaggcggaggttgtagtgagttaagatcgtgttattgtatttttaggtgatagagtgagattttgttttaaaaaataaaataaaaaatttttttatgggtgtgtttttgtatgtaatttaattattgtattttggttttgtattattttaatagatacgttttaatgtaatttatgttttggggagtggagggttagagtaggtggttgttgtagtttttggaggtagttttgttcggggtggaaattaaggcgtttttttttatagtggatagggattcgttgtggtggaatggaagttagttatttttaaaagaaattttattaaaaaaaaaattttttttgaagtatttttttttttaaaattaatgtaatataaatttttttaaaattattttttattatagtggaatgattttttaaaattttatgttttttaagttttttggtattagttagatattttttttttttagtgttagttagttttgttgtagagagttttcgttattattgaaaaatattgtttattttggattgtaatatatttaaagaacggtttttatttattgtgttggtgtagagaattttcgttttatagcggaggatagtagagaaggataatgggaattttttttttttttttttttttttttgagatggagtttcgttcgttttgtcgttaaggttggagtgttttggtttaattttggtttattataatttttgtttttcgggtttaagttatttttttgtttcggttttttgaatagttgggattataggcgttcgttattatgtttagttaatttttttatttttagtagagatggggttttattatgttatttaggttagttttgaatttttgattttaagtgatttattttttttggttttttaaattgttggggttataggtatgagttatcgcgtttggttaggaatttttattgttaagaaaatggcgtaaatgtgttattaaaagaagttatgttttttaaagatttttgtttttataagattgagtttatgatattaaggcgtgttattaagatttaaaagaattttacgtatttatatattgaagtgatttggtttttgagatttaaggtttttgatttttttattagtgtttttttatatgggtcgattgttattggaaaggagagtagaaacggaaatagattcgtttggatagaatttaaagtgtaaataggaattgtgtttagagagaggaggaggtggtagaagtatgaaggttgtttagatttttatgttttaagaaagatcgtttttttttggttttaatttttttggtttagaagtttaggatttgtttaaaattagaaaaagtaattttgggggaaaaaaaaaatttggatgtggaagaaattggcggtgaaagttatattgagtgattaatgataaaaattattttcgttttttggtttttgagtcggtatgaaacgttggtagtttttaattaattattattatgatattaatattattgattttttattgtttttgttattttttttttagatatttgtattttttaagtaaatattattcgttaaaattttgttataagttgtgtaattgggttcgtttaaggtatcggagtttgcgcgtaatcgtataggtacgcggtcgttcgcggtttttaggaagaaacgtttcgtcgtcgtcggtaagcggggtcgaagtttcggcgggtttttttcgggtttgggcgttcgattttttcgcggttcgcgtttttcgggcgggtattaaggttcggaattcgttttagcgttcgtcggggtttttttcgcggagttttcgttcggcgttttcgggttcgagttcgttttcggtattcgcgcgtggagagagaggaaaagagttagtatcggcgggcgggtgtttagttttagtttttagttttttttcgggaggcgaagatatgacgcggcggggttttcgcggggtcgaggcggcggcgcggttttcgggtcgggcgggcgtgcgcgagtgagtttaggtgtgagcgtcggggagcgagcgggcgggagaacgacgcgcgcgcgtggggcgtcggggtcgcgcgagtcgggtgagtgttattgtcgttaagggggcgcggtcgtcgcgcgtcgacgtggcgtagtcgagtttatcgacggtatgcgtattgacgttatcgcggttcgttcgttttgttgggtcgcgaagttaagtatacggtgcgtgcgtagtcggtcgcgttacgtcggatgttgtggtcgggggcgggggcgggggcgggggcgggggcggaggaagggaggggagagaaggggtgaagaagtgagagggagaaggaaggagagggaggcggggttttcgattggttgcggggattggagttgcggaaagttaagtagggtttagttgaggatggtttttgtagcgaacgcgtttagtcgggtttttggttacgcggcgacggttgggtgattgcgttttatagtgcgggttagggtcggggcgtttcggtagggaggcgatcgttttttgaggtttttagtttttgtcgcggtagcgtttaatgaagcgcggaaaggagagtttagatggtagcgacgggggtcgagagagtaggaatttgttaaaagacgatgcgaggggagagtttgtttttcgagtgagggttagcgttggggagtagagacggtggtttttgtttttgtttttttcgttatgaattaaaaataaaattttaagttttgtagttaacggatggattttttttttcgtttgtggttttttaagttattttgaaaaattagtttaggttttgatgggaagcggaagttaaatatggttttataaatattcgtacggagattttaagattaatagaggattttgataagaaatatttgtagtgtattttcggttttatttgtatgataatattttggtttttataatttttttatgtaattcggatatttttttttattgagtttaggtttttagatgataatttttaattagttgttaattagaaaatttttaaatgtatttatgattcggacgtttttattttatattttattttttaaagagttaatttatattttacgtattgattgatgttttatgttttttttaaatgtataaaattaagatgttttttggttattttgggtatatgttattagaattttttgaggttgtgttaatgtacgtttttaattttggtaaaataaattttttaaattgagattatttttagaaatttttggtttttattattatttttttgttgtcgtggttgatttttggttttcgtgttttggatcgtgtttttttcgtttgttttagtgttttgtaattgttgttaattttcgtaatgttttgttggattcgtatttagataggtttaatttttttagcgaaggaaatattatttttcgtttggttgtatttttttttttgataataaaattgtttagggaggttgagttttttattttttgttattttttttagtttagtttgtttggtttttattaagttttgttgtattgtttttaattatgggaggtttttttgtggaagttatttataatttatgtgttgttagatttaatggttattttttatttttattttatttgagtttttagtagtatttgatgtagttggtcgtttttttttttttttgtttcggaggtgttatattattgttttattttttagttttttggttattttggttgtttattttgttagtttggtagttcgtttttttttagatttataaatatttgagtatcgtaaggtttagtattggtttttttttttatttagattttttatagatagttatatgtagtttgtggacgattattatgtagatgtttataggtgttaaatttgtaattttatttttttatttttgttttttttttgaattttagatttattattattattatttgtagacgtttatgggtgttatatttgtaatttaatttttttttttttgtttttttattgaattttaaatttattatcgttattttggtttttttatttgttgtttaatttagtgttgcgtaattttgtgtattagggtatatatggagatgtatatagtatatattggttttgtattttttattttatatatatattttaatatcggtaataggataattgttggttaggttgtagttatgatatgtttgttattgttttgtatttatatttaaatttttaagtgggtgttagtagtttagaagagaattttgaaattaatattgggttattttttaaagagatagtatattatttacgtttttaaaggtttaaggatatttaattgattaattttatgagtaattttttttttatgtatgtgtaaaagtgttatatagttaaaaatttatgtcgtatgttttaagtttaaagaattattttttggaagtataaaatgaaaattttaagttgaaagagtatattgtggtattatttaattggtagtgtttttatttttagtggtatttaaaataaagttgtatgttacgagttatagtattttagatttaataataaatgttattggtaaggaattttggggggtgggggagaaagtttttataggaaggagtagagttttagaggggttttggtggtttttggattgttttgaggtttgataggttgtgtttttttgtttgtgatttgttttttaggtttgtattgattgggaaattttggttgttttatagtaggtagttagtcggtttgagtagggtaggagaggattttttttttataatttatattattagaaatgttgtgtgattattaggtgatggttaggaagttgttatattgtttttttaaaataataattggttgtagttagtgttagggaaaggtagttttttagtagatagaaaaaatttgaaagtggtggttagtagttttttggtaagatttttttgttatatatcgagaggtaaaatggtaacgtttgattggtatatgattttttaggaatatgaggttggtaagggaagattgttttaagtgagtatgtgtatatttttaataaatatattgtttttgtttattttttaagcgttggtaagttattgtgtatgtggatagtttattttaagggaagaattaggggataagattgatttttgaagaattaagggatgtaagattttagaagtatgttaatgtataaaattttaagttaaaggttaaatcgtgtatttgatttttaaagttatttgtttggttattttttaagtgtattttttttttgttttagatttaaagttttttaataaatttttattttttttttaaagttgttttagtttttttttttgttttatattttttagttgaatttttttttttgaagaggtaagaattgaggttgttgtagatttgtatagatttattgttattaacgtattatatttgggtgttacgtgatttaggtatattttgtttttgatagtgtgatagttaagttaattttatatttttaaagaatttttgattttttatttatcggtaaatagttttttttttagaatataatttaagttatttattatagtgtggaataatttgtttatttaatagtatttttaatgaaggaaatattgttaagaaggtagtgaatttcgtaaaaaaaagatatttattttttagttttttttgtagttaggggtagttaagtgatatagttttgattatggaaatttgttggggtgttttggggaaaatttatatttttaatatggggatattttttttttttggtgatattatttgtattattttgaatttagatagaaggttaaaggtagaataattatatcgtaattgtgaggtaattaaaggtatgaaaattataagttaaaggtgatagagtaggaaggttaaaggtatgtgggaatttgagggtttatggaggcgttttagagttgtggatttttcgtttagatttttttgttgtgtgggaaataaatttttattaaataaagtttttgtggttggtgtttttatgggtagttaaatgtaatttttagtatatatggtttattagattttgtatgatgggggttttgtttagttgtgagttttttttttttggtttttttggttatattggtttttttgaggtttttttagtaggataagttaatttttttttttgggattttgtgttagttatttttattgagatagttaagtataaaggggttcgtagagaaattttgattatttgtatatcggaagatggggtggagttatagaagtttacgttttttataggggagaggagtttgattttttttcgggtggaatttgggatttaatttgtgacgcgggaaatcggttagtaggatttttgttttgttgaaagtttttgtttttttttttttttttttgtttaataaattttattttttttattttttaaagtgtttgtgagtttaatttttcgtggttatgtgataaggacgttttttttagttaggttaataagaaagttttataatattattgtcgagaattgttttttttagattttcgcgtagttaatttttttttattttggaattagttttttaaggggtttgttttgttttattgtttttatagtattttatttttatttgaaattttttatttatttgtttgttggtttattgtttttttttattgattagaatgttagttttatgaggggagaaatttaatttattttgtttattaggtatttttagtatttaaaattatggtgggtatagaagaagtatttaatagttattttttttttataattttagaatatagatatatttaattttttataattgttatttaaatgaagagtagttaatgatgattaaatagagaatgaaaaatgtatatagtatatagatggtatatggttagtgattttttttgatatttgttttattttgtaaatattttgtgtgtgtatatgtgtgtgtatacgtgtgtgtatgtatgtatgggagtgtttagtttttttagttttagatgttgaggataaatgttaggtattatttattgg

SEQ ID NO: 43 - DNA, 6059 bp, Artificial Sequence
  chemically treated genomic DNA (Homo sapiens)
acgcgtttgtaattttagttatttgggaagttgaggaaagagaattatttgaatttgggaggtagaggttgtagtgaggtaagattgtgttattgtattttagtttgggcgaggagagcgaaatttttttttaaaaataaaaataaaaataaaaaattatagcgagatttaattttaattaaaaaaataaagaaattgtatatatatatatgtatatatatgtatattatatatatatattatatgtacgttttgagaaaaataatattatgaatttattattcgttaaaaattagagaaaatattaaattttttataaatttatatagtatttttatataggggttatgttaatagaaagaaaggattattagataattttttttaaaatttttttattattttattgaattttataatttgttttattaaaatatttttttatattttttgtttttttttttttttttgtgagatagagtgttgttttgatgtcgaggttagagtgtagtggtatgattttagtttattgtaattttttttttttagtttaagtaatttttggtttaagtaattttcgtgttttagtttttcgagtagttgggattataggtgtattttaatatatgtagttaattttttgtattttagtagagacggggttttatcgtgttgtttaggttggtttcgattttttgagttttgataatttattcgtttcgtttttttaaagtgttaggattataggcgtgagttattttatttgattaattttttgtttttttaaaagtatagtaattatttttaagttttagtaataaattaatgggtagtttgttaaatagttattggattttatattaggagggttttttatatgtatgtatatttaaaaatgatattaagatttttttatataaatttattgtagagatatattttaaaataaggtaaggaatataaatgatgtttattttttttttaaattaatagtttttttatataaaaatattagatgatataaaatatatttttttaaagtataaagttttatatagaataaaataaatattttatggttatttttaagaataagtagtgataaaaagtttttgtaattgggtaataaaattttagtttttaggaatatgttttttttttttttgtttttttgagagttgttattattatataatttatagtatttttttaattatagaaaattagcgtttttttaagtatagagattatatattaattatttttgtgttttttgtataggattaatttagtgtttgttataattaagttaaattttaagataggagttttaaattattttaggtttaatttaaaattgaaaaaaagacgttttttagagtttgagaataaaaagatattgataaagaataaagttatagatatttgtgcgatattagtttttttttttattaaatatagagttatttattaatattgtagaaatgtttgtagacgataaaaagaataaattaaaaatatggattttgttaatatgtttaaatattaatatagatttttttattttaaatttatattaatatttatatattcgaataatgaaaatgaaaggtttttaaatgagatttaaatataaattggttttattttattatagtttaagtttttaaaattatatatataaattatgtgattgcgtttatgtttattttttaatttgagggtttagtgttttttattcgattttttgaaggataagtgattttaaaaaatttttaagaattattaatttagtttattaagaaatattttattttttagaagaatatagttaagttggtttagtttatgtatttttattttatatttatagagtttatagacgggatttttattatatgaaattagttttttttttttttttttttttttttttggagatggagttttttttgtggtttaggttggagtgtagtggcgtaattttagtttattgtaagttttgtttttcgggtttacgttatttttttgttttagttttttcgagtagttgggattataggcgttcgttattacgttcggttaattttttgtatttttagtagagacggggttttattttgttagttaggatagtttcgattttttgatttcgtgattcgattttttgatttcgtgattcgtttatttcggttttttaaagtgttgggattataggtgtgagttatcgcgttttgtcgaaattagttttttaaaggatttttttagtttagttaagaagttttaatatttataggtatatatattaataattattagtatttaaaaatagttttttggttttaattttatattgttttttttaatttaatatttattatcgttaaaataattttttttagattgtatttaggttatttatagagatattttgatgatttttattttaaggtatggattatttattgaatggttatatttgttgaatgagtgaaaaaggatttttttttttatagattttaagttaagttgttagtatttatgtagttgttttggtataagttaagttgtgaaagtttttttttttacgtatataattttaagtgttagaaatgttttgttttttttataaatttaaaataatatagttatggatatgtattttatataggttagattcggtaaggatagttacgttttatatatatatttgatataatcggttttttttaaatataagttaattagttttatgtgtttttatttttttagtatatttagatttgtcgataaagattttttgaggtattatggtatgttgaatatattgttgtagtagtagtgaaaatatgggagttatagttttaattttgttattaatttaatatgcggttttggagaagttttttttttatgtttaaattttttattttgtaaaatggaagaaagtattttattatttttatagagatttagtattataaagaaattgaaagagtttttttattgtattgtaaattattattataaattcgcgataataaataaggttatttattttttatagttttgtagtaatgattttgttaaagatattttggttttttatatttatataatttattttaattaaaggtataaattatttttaagattataattggttatgttaagttttttttttttttgattttatagatatatgttgtatagaatattattattgtcgtttttttttaataagtaattaggggtttttaatttttaaaatatatatatatattaatttgtaaggaattttttaatatttatttaagaaataagttaatttataaggggaattttattatatttatataaataaaggtaaatttttacggaaatatttgttatttttatatatatatattaatatagtcgttatatattaatagattatttgtttgttagattaaaaatatttttttttatgtataaattaattagtgatatttattaaacgtataatattgagattattttgtcgtttttatatatcgtttaacgcggtagggatattatagattttgttatataggtaaaatttttttttaagatcgtgttttcgattatttttattttttaattaaatatatataaattggattatgggggaggtttcgattatgtttataaatataaattaatttgttaggggtatagtcgatttcgtttttattcgtttattttttagtttttttcgggagtttgtttgttagggatatttttttatttcgtttggagggatttttcggtaggtttaggatttttttttttgttttttttttttttatttttattattgtttttttagaggtttaggttcgggagatgatagtggtttttagaaagtttaggatttaatcgttgagagagtgtttaggttcgaatgtcggtttaaatcgttttatttatcgtgtcggaggtcgagagcgatgagagtatagggaagtgaggaagagggggtggtcgttaggttttttcgtttttttgggtttatcgcggatttttttcgtttgttaggaggcggttagcgggtaagtcgattggcggaaatgcgagagaggagaagggaaaggtggagggttaaaggggtaaattgagaggaggcggatttcgtaatcgatattgggatcgtttttttttcgtaaagcgaatttaaaatggcggcggtagcggcggtagtagagtggcgcggtagtttttttagagggagggagttaagggcgtttagcgatatttttaattttttattttttttttttcgcgtttttttttacggttttcgcgtttcgttcgatttcggttatgtagcgcgtacgttagttcgtacgcgtacgagtgtttacgggttcgtcgttggttgtttttattaattattattttcggtcgttttgcgagttagttatttcgtacgcgtttatttacgggaattttttcgtttagttttttatttttttttagattttgttaagtcggttttagcgtaggtttttacgcgtatttttagcggcgcgagtttaagttttttttatttttttttttttttttttttttttttttcgttcgtacggttattaatcgtcgttaaagtagtcgtcgttagtatttttattttatatttttcgcgcgtgcgttttttatagtttttatcgcgggattgttttatttttggcggttgtaggggtaggagaggaagggatcggtaaagcgagtttggtttgtcgtttgattggaattgttagggtggtcggtcgagttttatgataatttatttttttgggttcgtcgtcgcggcgttgcggttcgtttttttttttatgggatcgcggcgaggggatcgagggcggtttagcgtttttttgtcggtcggtggttggaggtcgcggcggttgcgcgttgagtcgttttttgtcggatgattcgatttttttttgtagttttaggacgggcgttttggagtcggttttaggtagcgtgtgtcggtcgtttagtttggagaattagttttcgatttacggtgagggaatggatcgatacgggtattgtatcgttgagggaaaggagcgggatttcggatttttaggaggtagggagtgaggtcggtagatcggcgcgttttcgggggggatttttttcgggcgttgagttgttaatttgggattcgaggaagttcggcgtggtggtgtgttttttgttgttgttaatttttttcggatttttcgaattttatattattgtttatatgcgatgatgtttgtttgtttttgacgtatttatttatggatggtattttagtttcgttagatagtttggtgatggaggatgaagaaattatgtgttttttatttagttttggatttagttttttttgtttttagtaagttatttttgttagttttttattaaaaagtgtatataaaaattaggtaattttaaatatgtttttagggttggtgtgtgaaataataagatagggttgggcgcggtggtttacgtttgtaattttagtattttgggaggtcgaggtaggtggatgataaggtgaagagatcgagataattttggttaatatggtgaaatttcgtttttattaaaaatataaatattagtcggtcgtggtggcgggcgtttgtagttttagttattcgggaggttgaggtaggagaattgtttgaattcgggcggcgggaagttgtagtgagtcgagatcgcgttattgtattttagtttggcgataaagcgagatttcgttatatatatatatatatatacgaaataataatatatgtaaagtggaattagtttttaggtatagggaaggtgtagagtattgtcgtgttgttatttatagttttgttgatgtcgataacgtttgtgggtgtaatgggtagtgttttgtttttttaagtcgttaataaaataaagtaggtcgggcgttttgttaaatagttgtattaatgatttgatttagattaatgaggatatattttttaaatttatgttttttataaaatttt

SEQ ID NO: 44 - DNA, 6059 bp, Artificial Sequence
  chemically treated genomic DNA (Homo sapiens)
aaaattttgtaaaaggtataaatttgaaaaatatatttttattaatttaaattaagttattgatataattatttaataagacgttcggtttgttttgttttattaacgatttggagggatagaatattatttattatatttataaacgttatcgatattaatagaattgtaaatgataatacggtaatattttgtattttttttatgtttaggagttaattttattttatatatattattatttcgtgtgtgtgtgtgtgtgtgtgacggagtttcgttttgtcgttaggttggagtgtagtggcgcgatttcggtttattgtaatttttcgtcgttcgggtttaagtaatttttttgttttagtttttcgagtagttggggttataggcgttcgttattacggtcggttaatatttgtatttttagtagagacggggttttattatgttggttaggattgtttcgatttttttattttgttatttatttgtttcggttttttaaagtgttgggattataggcgtgagttatcgcgtttagttttattttattattttatatattaattttggaggtatgtttggagttgtttaatttttatgtatattttttgataaggaattaataaaaataatttgttgaagataagggaaattgagtttagaattgaatgagaagtatatggtttttttattttttattattaggttgtttaacgaggttgaagtattatttatgagtaagtgcgttaagggtaaataaatattatcgtatatggatagtggtgtgaaattcgagaaattcgaggagggttaataataataaaaagtatattattacgtcgaattttttcgggttttaggttggtaatttaacgttcgggaggaatttttttcggaggcgcgtcggtttatcggttttattttttattttttggaggttcggagtttcgttttttttttttagcggtataatattcgtgtcggtttatttttttatcgtgagtcgaggattagttttttagattaggcgatcgatatacgttgtttggggtcggttttaaagcgttcgttttgagattgtaaaaaagggtcgggttattcggtaggaaacgatttaacgcgtagtcgtcgcggtttttaattatcggtcggtagaggggcgttaggtcgttttcgattttttcgtcgcggttttatggaggaggaggcgagtcgtagcgtcgcggcgacgaatttagggaggtaggttgttatgggattcggtcggttattttggtaattttagttaaacggtaagttagattcgttttgtcggttttttttttttttgtttttgtagtcgttaggaatggaatagtttcgcggtggggattgtgggaggcgtacgcgcgaggagtgtagggtgggggtgttggcggcggttgttttggcggcggttggtggtcgtgcgggcggggagggagggggaggaaaaaagaggaggtggagaaggtttgggttcgcgtcgttgaaggtacgcgtgagggtttgcgttggagtcggtttgatagggtttgagggggagtggagaattgggcgaggaggttttcgtgggtgagcgcgtacgggatggttggttcgtaggacggtcgaaggtggtggttggtgggagtagttagcgacgagttcgtagatattcgtacgcgtgcgggttgacgtgcgcgttatatggtcggagtcgggcgaagcgcggggatcgtggggaagaacgcgaggagggaggagtgggaggttgggggtgtcgttaggcgtttttagttttttttttttggaggagttgtcgcgttattttgttgtcgtcgttgtcgtcgttattttgggttcgttttgcgagggggaaacgattttagtgtcggttgcgggattcgtttttttttagtttgtttttttagttttttatttttttttttttttttttcgtattttcgttagtcggtttattcgttggtcgttttttgataagcgggagggattcgcggtggatttagggaagcggaggagtttggcggttatttttttttttttatttttttgtatttttatcgttttcggttttcgatacggtgagtagaacgatttgggtcggtattcgggtttaagtatttttttagcgattgaattttgggttttttgggagttattgttatttttcggatttggatttttgggagagtagtggtgaagatgggggaggggagagtagggagggggattttgagtttatcgggaagtttttttaggcggggtgaaggggtgtttttgataggtagattttcggagggggttgggaagtaagcgagtggaggcggagtcggttgtgtttttgataggttagtttgtgtttgtaggtatgatcggagttttttttatagtttagtttgtgtgtgtttaattaagggataagagtggtcgaggatacgattttgagaggggattttatttgtgtgataaggtttgtggtgtttttgtcgcgttgaacggtatgtgggaacgataggatgattttagtgttgtacgtttaataaatgttattggttagtttgtatatggaaagagatgtttttggtttagtagatagatggtttgttggtgtgtagcggttgtgttggtgtgtgtatgtgaggatggtaagtgttttcgtaagagtttgtttttatttgtgtaagtgtaatggagttttttttataagttagtttattttttgaataaatgttgggaggttttttgtaggttgatatgtgtgtgtattttagggattgggagtttttagttatttgttgggaaagagcggtaatggtagtgttttgtatagtatgtgtttgtgaggttagggaggggagaaatttggtatagttagttgtggttttaagaatagtttgtgtttttggttagagtgagttgtgtaaatgtgaagggttaaaatatttttaatagaattattgttataaagttgtaaagaatgggtggttttatttgttgtcgcgggtttatagtaatagtttataatataataagaaagtttttttagtttttttgtgatattgaatttttgtgaaaatggtaggatgtttttttttattttataaaataggaaatttaggtataaggagagaatttttttaaggtcgtatgttaaattggtgataaagttggaattgtaatttttatatttttattattattgtagtagtatatttagtatattatggtgttttaggaagtttttgtcggtaaatttgagtatgttggaaagataggagtatataagattggttggtttgtatttgggggagatcgattgtgttagatatgtatgtggaacgtagttgtttttgtcgagtttgatttgtatgaaatgtatatttatggttatattattttggatttatggaggaagtagagtatttttgatatttaaggttgtatgcgtgagggagaaggtttttatagtttaatttgtattagagtagttgtatgggtgttgatagtttaatttgaaatttgtgggaggaaggatttttttttatttatttaataaatataattatttaatgaatggtttatgttttgaggtgaggattattaaggtgtttttgtaaatagtttggatgtaatttgaggggagttgttttgacggtggtaggtattaagttgagggaggtagtgtggaattaaaattagagaattgtttttgggtattggtaattgttaatatatgtgtttgtggatgttggaattttttggttgggttgaaggaattttttgaaagattgatttcggtagggcgcggtggtttatatttgtaattttagtattttgggaggtcgaggtgggcggattacgaggttaggagatcgaattacgaggttaggagatcgagattattttggttaataggatgaaatttcgtttttattaaaaatataaaaaattagtcgggcgtggtggcgggcgtttgtagttttagttattcggggaggttgaggtaggagaatggcgtgaattcgggaggtagagtttgtagtgagttgagattgcgttattgtattttagtttgggttatagaggagattttatttttaaaaaaaaaaaaaaaaaaaaaaaaaagattgattttatgtagtaaggatttcgtttatgaattttatgaatatgaggtaagaatgtatgaattaagttaatttagttgtatttttttggaaaatgggatgttttttgataggttagattagtggtttttaaaagttttttggggttatttattttttagagaatcggatgaaagatattgggtttttaagttagaagatgagtataagcgtaattatatgatttatatatatgattttaggaatttaaattgtaatgaaatagagttaatttatatttagattttatttgaaaattttttatttttattgttcgggtgtgtggatgttagtatgagtttaaggtgaaggagtttatgttagtatttgaatatgttgataggatttatatttttaatttattttttttatcgtttgtaaatatttttgtagtattagtaaatgattttgtatttggtaaaaagggaagttaatgtcgtataagtatttatggttttgttttttgttagtatttttttgtttttaaattttgagaagcgttttttttttagttttggattgggtttgaggtgatttgaagtttttgttttggagtttaatttagttataataaatattgagttaattttatgtaggagatataaagataattaatatatggtttttgtgtttgaagagacgttaattttttgtggttgaagagatgttgtgaattgtgtgatagtggtagtttttaaaaggataaggaagagggaaatatatttttagaagttgaaattttattatttaattgtaaagattttttgttattatttatttttaggaataattataaagtgtttattttattttgtatggaattttgtattttaaaaaaatatgttttgtattatttggtgtttttgtataaaggaattgttggtttgaaaagaaggtaaatattatttatattttttattttgttttgggatgtatttttatagtgagtttatgtaaaaaggttttaatgttatttttgggtatatatatatgtagaaagtttttttgatataaaatttagtagttatttgatagattatttattaatttattattggaatttaaaaataattattgtatttttaaaagaataagaaattggttaggtggggtggtttacgtttgtaattttagtattttgggaggacgaggcggatggattgttagagtttagaagatcgagattagtttgggtaatacggtgaaatttcgtttttattaaaatataaaaaattagttgtatgtgttggagtgtatttgtagttttagttattcgggaagttgaggtacgagaattgtttgaattaagaattgtttgaattgggagggggaagttgtagtgagttgaaattatgttattgtattttagtttcggtattagagtaatattttgttttataaaaaaaaaaaaaaaagtaagaaatgtaaaaaggtgttttaataggatagattataggatttagtgagataatggagaagttttaggaaaaattgtttgatagttttttttttttattgatatggtttttgtataagaatgttatgtaaatttgtgaaaagtttaatattttttttaatttttaacgggtagtaggtttatggtgttattttttttaaaacgtatatgtgatatgtgtgtgtagtgtgtatatatgtgtatgtatgtgtatataatttttttatttttttaattgagattaggtttcgttatggttttttgtttttgtttttgtttttgagagagagtttcgtttttttcgtttaggttggagtataatggtataattttgttttattgtaatttttgttttttaggtttaagtgattttttttttttagttttttaaatagttgggattataggcgcgt

SEQ ID NO: 45 - DNA, 9838 bp, Artificial Sequence
  chemically treated genomic DNA (Homo sapiens)
atttttgtgttatttagagaagtagttgttagttgcgcgggtttgttgagtatttgaagtaggattagtgcggtaaggaattacgagatgttattttgaacgtatttggatggttttgtggagcgaggggttttggattgaatttcgtaggttttagtaatttttcgaattgttgacgagtttataagttttatttgttattaggattttttgtggttattttagttttgattagtttattagaaatttattttttttttttttttttttgagatggagttttatcgtttgttaggttggagtggaatggtattatttttgtttattgtaatttttatttttcgggtttaagtaattttgtttcgggtttttgggtagttgggattatatgcgtgtgttattacgtttagttaatttttatatttttagtagagatgaggttttattatgttggtttggatgattttgattattcgattttgtgatttattcgttttggttttttaaagcgttgggattgtattattgtgttcggttttgtaaatatttttttagaggtagagttttgttgttttttagatgagtatagtggtgtagttagtttattgtattttttattttttggatttttttgttttagtttgttaggtagttgggattttaggtatgtgttattatgtttagttaatttttatttattttgagatagaattttgtttggtttggttggtttcgaatttttgattttaagtgatttgttcgtttcggttttttaaagtgttgggaattataggcgtgagttattgtgttgatttaatttttattttttttgtagtaatggggttttattatgttgtttaggttggtttttttttcgggtttaagcgatttttttgttttagttttttaaagtgttgggattttaggtgtgagcgttaatagtttagaaaattatttgtttttttaaatagtgtttaagatgtgaggaggtttaattttgttagtgttgataaggttaatatgattatttttcgttttttattttgtttttaggaaggtaggtggggattgtgaagtagggttgtggggttttcggtaaaggcgggggtagttttggttttgtattgttaaggttaagttttagttgaggttttgtttatatgtaggtatgtttgaggtttggtttggttgtcgtatttgaattggggttgtaattgacgttgtttttagtagttagggtaacggattattgtgtttcgagaattttattttatcgtttaggatggagtgtagtgttgtgattttggtttattatagtttttgttttcggatttaagtgtttaagtaatttttgtgttttagtttttcgagtagttggaattataggcgtttattattaggtttgtgtaatttttgtatatttaggtgagatggggttttattatgttggttaggttggttttaagttcgatcgtaagagattagttcgttttagttttttaaagtgttggggttataggtgtgagttattatatcgggttttatttttttttagtagtgtaaacgttaagatggtatgtggaagttgaatttttttttttttttgagatagtttttgttttgttatttaggttggagtgtagtggtttaattttggtttattgtaagtttcgtttttcgggtttacgttatttttttgttttagtttttcgagtagtcgggattataggtattcgttattatgttcggttaattttttgtatttattagtagagatagggttttatcgtgttagttaggatggttttgatgttttgatttcgtgatttgtttatcgtggttttttaaaatgttggaattataggcgttagttattatgttttgttatttttttttttttgagatggagttttttttcgttatttaggttgtagtatagtggtatgatttcggttcgttgtaatttttattttttgggtttaagtaatttttttgcgttagtttttcgagtagttgggattataggtatgtgttattaggtttggttaatttttgtatttttagtagagatagggttttattatgttgagtaggttggttttgaatttttattttaagtgatttgttcgttttggttgtttaagttgttgggattacgggcgtgagttattatatttggttaatttattgtacgttgaaaatgtaaataaaaaatataaaggtcggtttgtggtttacgtttgtaatcgtagtattttgagaggtcgaggtcggcggattatagatattgagattattttggttaatatggtgaaattttgcgtttattaaaaatataaaaattagttgggagtggtggcgtgtatttgtagttttagttattcgggaggttgaggtaggagaatcgtttgaatttaggaggtagagattgtagtgagtttagattttattattgcgttttagtttggacgatagaaggagattgttttaaaaaaaaaaaaaaaaaaaaaaaaaggttgggtaaggtggtttatgtttgtaatttttgtattttgggaggtcgaggcgggcggattaggaggttaggagatcgagattattttggttaatacggtgaaattttgtttttattaataaatataaaaaattagttgggcgtggtgacgggcgtttgtagttttagttattcgggaggttgaggtaggagaatggcgtgaatttgggaggtggagtttgtagtgagtcgagattgtgttagtgtattttagtttgggtgatagagcgagatttcgttttaaaataataataaaaaatgaatttaggtcgggcgtaatggtttacgtttgtaattttagtattttggaaagttgaggtgtcggattatttgagtttaggagttcgagattagtttgggtaatatggtgaaatttcgtttttattaaaaatataaaaattagtcgggcgtggtgatgggtatttgtaattttagttatttgggaggttgaggtacgagaatcgtttgaattcgggaggtggaggttgtagtgagttggatatcgtcgttgtatttttgtttgggtgatagagtgagattttgttttaaaaaataaaattaaaaaaaaaataaatttgatattttttagtgttgttagttggtatatattatgttttaataaaatgtttgttgttattttttattttgagacgaagagggattttgtgtatgataattttagattgattttatttgtattttaagtatttagaatgtgggtaatagtttttagtggaggaaattgttatatagggattaaagtagttttagggtttattttaggagttgttaggcgcgttcggttataggtgagttatttattcgtttaatcggtgttttaggaaggtaggaagcgggatgtagggttttagttttatttttcgtagttttagtatttgggttagaggagaggcgggcggggcgatgaagggatcggaagtcggtttttttttcgttcgtttgattagcgtcgattgtagttaatgaaattagggatggcgagtgtttagttagtggtgaggttgtattcgggtgtgggtgtcgaaaaggtagttgggggcgggacgtcgaggtgcggtacgagcggcgggcgtatcggttaataggcggcggggttcgtttttcgggggtgggtattggcgggtgcggtgacgtcggcgtaggcgcgtcgcggcggtaggggcgcggggtttttggaggcggcggcggtggttagcgcggcggcgtcggtcgtatttttcgggttgcggagggtaaagagcgggttcgggtcgaggttggagggttgggtggggttagagcggcgtttcgggggttcgcggaggacgagggagggagagaatttgaggagttggtaggtttggggatttatttgggtgatcgggtcggggaaagggttcggtcgggcgtgcgaggggcgtagcggttttagggatgttggagcggagttttagggatgggtaaggttttgggggcggggggaggttttgtaaagggagttattggggtttgtttaggggtttgtgcggagattgcgggcgagaaggggtagaggacggtggaggagatttagatggggttttttttggcggttcgttttggggggtaggggagacggcggttgggggattttgatatatggagcgtggaggaagaggttaattttgcgaggatagtggaggttagcgggggagggaggtaaagtgggtttttaggagcgtggaaggcgtcgttcggtttttggaaaatttagaattggagggagttagagatggttgggggtgggcgggggtgttttatcgatgagggttttaagagatttgtcgagggtaaggattaggaggggttaaggtagtaatttgggaattttgatcggaatggtagtattttgggaggtttgggacgatcgtttgagttttggagttttaggttgtagtgagttatgattgtattattgtattttagttagggcgatagagcgagatttttttttaaaaaataataatattaataataaaagaagtagatttgagaatttcgttaagatattggttagggagtaaggtagttttgggatttgaggttgaggagaacgtgtaggaatggtgggggattttggttgagtaggttgagagaagtttaggagtgagaggtaaaaaaagacgtaggtagcgtcggggaaattagaattatgtgtttggagagagttttgcggggtgaaggtggtttagtggggttgttattaaatttttgagtggttatggggttttaagaggtgatatgataggatttagtttagtaaatatagtatttttttttgtcgagtttggagttttagagtggagaggtgggaggtttgtgtttgttggataggtttgtttattaatttaggagaaaagggtggtgttttagttttttatttttgtttttttttgttttttttagggttgttattaggggatttttgaggttttatttttaggttgcggtgattgtattttttttggagtggaagttgttggaaggcggatcggtcgttatgtttacgtttaggtaggaggacgtggaggattattatgagatgggggaggagttgggtaggtgagttgtttgttcgtacggttgggttttagggataggagagaggcgttgtggggttttttgaatagtagttttttttttttgttttttattttgtatgttgagaaggaatgagttagtattatgcggtgggggaacgaatttgggtcgtggagttagatagtttcggttgtgaatttttgtttgggaattttttgtgtgttttttgtggggagaaaagtaattgagtcgttatagtagttaagatcgtgtttggtatggggtattagagtaatagatgttagttgtttttgttattaaaagatgtgttttttgtttgggtaatatagtaagattttatttttataaaaaataaaaatgaaaaaaaattaattaggtgtggtagtttatgtttgtagttttagttattagggaagttgagacgggaggatggtttgagtttaggagttggaggaggttgtagtgagttatgatcgtgttattgtattgtagtttgggtaatagagtgaaattttatttatttaaaaaaaaaaaaatttttttgtgttaatttttttttgtgggaggtattttagtttttttgtttagtttttggatgtttaaagtggggggagggaggggcgtgttttttagttgggtttaaatttcggttaattgtttaatatgtttgtgggaaaaagtagaggtttttttttttagggaggtagttgattttttgtttgtttgggttttggagggtttttttggggttttattttttttagattagttaggtattattaggttttgtttttttttgtagagtttttagttttatttggtgagtttgttattggttagtttttttggagtttttttatgatgttattagaagggaatgtaaataagtgagttttgtgttaggttagggagagtgttgtaggtttttttgggattttgaggttttttttttaggaattttttcgttagtggtagagaaagtatgtttttttttttttttttttatgttttagtgttgattttttttgttaggggtcgtttggtaaaagttagtaaaatttagttaaattttttttaattcgtcgattttatttttaggaattaatttattggaaaattgtatatatatggatggaatgatttaagattggggtagttgttagaacgtttattagaataatagttttttttttttttttttgatattattttattttgtcgtttaggttggagtgtagtgatgcgatttcgatttattgtagtttcggtttttagtttagtttttcgagtagttgggattataggagttcgttattatttttggttaatttttgtatttttagtagagataggattttattatgttggttaggttggtttcgaattattgattttaggtgatttatttgtttcggttttttaaagtgttgggattataggcgtgagttatcgtatttcgttgggaatagtagttttttaaatggttttttttaaattattgtattagggttggaataggatgtagtttgtaaaaagaattaggtagggttaggtgcggcggttttcgtttgtaattttagcgttttgggaggttaaggcgggaggatcgtttgagtttaggattttaagattagtttgggtaatataagttgatttttattttttaaataaatagaaatttataattttaaaaaaagtatttagttttttgtttttgtcgtgaagttttggaggtttggtgtgtattttatgtcgtagtttttttcgggattggttatattttacgggtttgatagttttgggtggttagtgtttgttgttttgacggtattgttttaggtagtggtttggaatatttttagagatatatgaagtgtaagatgaaggtttagaatgtagtaatttttgtttgtttgtttgagacggtgtttggttttgttgtcgagattggagtgtagtggtgttattttggtttattgtaattttcgtttttcgggtttaagtgatttttttgttttagttttttaagtagttggaattataggcgtttattaacgtgtttagttaatttttgtatttttagtagagacggggttttgttatgttggttaggttggttttgaatttttgattttaaatgatttgttcgtttttgttttttaaagtgttgggattataggtgtgagttattgtgtttggttttagtttatattttttttttgagacggagttttgtagtgtcgttcgggttggagtgtaatgtcgtaattttagtttattgtaattttcgttttttaggtttaagcgattttttttgttttagtttttcgagtagttgggattatagatgtttgttagtacgttcggttaatgtttttgtatttttagtagagacgtggtttttattatgttggttaggttagttttgaatttttgatatcgtgatttgtacgtttttgttttttaaagtgttgggattataggcgtgagttattgtgttcggttttttagttcgtatttttaaatattatgaattttattagtagaaattgtcggtgtgtaggttacgtttgggtcgtgtttgggttgtggtaggtatttaggaagtgggttgggagtgatatttgagattattattgaggagggtttgttgtgtttttatttgcgttgggggttggggaagttatagagaagcgaagagggtgggtttagtttttggggagtttttttttcggttggggagatgaggtacgttttatatttcgtagaggaattgagagtttgttagtggttttgtttttaaggagtaagtttgtggttagtgagatcgggggttgtttggaggtgggcggttgtggtttgttgttgttgtaggaggatttagtggtagaatttgaaatttggttggtaatagtaaaatagggaaaggcgtggtttatagaattaggttgtttaggtgtgtagcggtcgtaggtgtgattgggtgttggtgtatatggtgttttgtgttttcggggtcgaagtttattttagtatggaggaggcgttttggtagagtgaatgacggggtttatgtgttattcgtagtgtttggtggttttttttttttggtttggtttgtttttaggtaggttttttaggtagttttttacgtggtggtttttgtcgcgagtttggatttaagtttagtagagggagagagagattttttttttttagtaggcgtttagagttttgtggattggatcggtttttttgggttggaaggcgtggttttttgtttgtttaggtttagtcgtgtttttttttattttttttttgggttattgagttttatagattgagagtgagcggtaaaggttgttttgggatagttgggtttgttagtaggagatagcgtggagtcgggaggtaggtacgtaggaattcggtatttagtagtagttgtttgttttttgttagagtatttgggttttggagtttgtagtatttggtttgaaggtttgaattttttcgttattgattgattgtatgattttgggttagttgtttttttttttttagttttggtttttttaaaatgcggatattggttagatgtagcggttttatttgtattgttaatatttggggtgggggagtgggaggattttttgaggttaggagttttaaagtagtttgggtaatacggtaagattttgtttttataaaaaataaataaattaggtgtggtagtgtgtttttgtagttttatttatttgggagggattatttgagtttaggagttcgagattagcgtgggtaatatagtgagattttatttttataaaaagaaaaaaaaattaattgggtgtggtggtatgtgtttgtagttttagttgtttgagaggttgaggtaggaggattgttcgagtttaggaggttaaggttgtagtgagttatgattgaattattgtattttagtttgagtaatagggttagattttgttttaagataaaataaaataaaaataaaaaaagcggatttggtatttgttttgtattttttatttttttgaggtaggattttgttacgttgtttaggttggagtatagtggtataattttagtttattgtaatttttgttttttaggtttaagcgatttttttgttttagttttttaagtagttgggattataggtattcgttattatatttagttaattttttgtatttttggtagagatagggttttattatgttggttaggttgtttttgaattttttagtttaagttatttgtttttttcgaatttttaaagtgttgggattataggcgtgagttatcgcgtttggtttttttagtttttttttgatatgtattgaattgtttatttttttattttttaaaaatacgtcggtgttatggtgttaacgtgtggttttgtatttttttttatatatttgttgggtatagttttgggaggggtgggaacgtcgcgtttgatggtgtggggcgttaaggaattgttttttgagaaggcgtagagtttgtattttcgtagtggttagtttatgttttttaagtgtttggtgtagggtcgcgtttaagaggagtaagtggaggtgacggggagttagttatttttatttatttttttcgttttttttatttttatttatttttttttttttttttagt

SEQ ID NO: 46 - DNA, 9838 bp, Artificial Sequence
  chemically treated genomic DNA (Homo sapiens)
gttggaggagggggagggagtgagtgggggtggaggaggcggagggagtaagtgggggtggttggtttttcgttatttttatttgttttttttgggcgcggttttgtattaggtatttgaaggatatgagttggttattgcgggggtgtagattttgcgtttttttagagagtaattttttagcgttttatattattagacgcggcgtttttattttttttagggttatgtttagtaggtgtgtggaggggagtgtagagttatacgttaatattatggtatcggcgtatttttgaaaagtgaaagaatgaatagtttaatgtatattaagagggaattgagggggttaggcgcggtggtttacgtttgtaattttagtattttgggagttcgaggagggtagataatttgagttgaggagtttaagagtagtttggttaatatggtgaaattttgtttttattaaaaatataaaaaattagttgggtgtggtggcgggtgtttgtaattttagttatttgggaggttgaggtaggagaatcgtttgaatttgggaggtagaggttgtagtgaattgagattgtgttattgtattttagtttgggtaacgtagtaagattttgttttaaaaaaataaaaagtgtaaggtaagtgttagattcgttttttttgtttttgttttgttttgttttgagatagggtttggttttgttgtttaggttggaatgtagtggtttagttatggtttattgtagttttgattttttgggttcgggtaatttttttgttttagttttttaagtagttgggattataggtatatattattatatttaattaatttttttttttttttgtaaggatgaggttttattatgttgtttacgttggtttcgaatttttgggtttaagtgattttttttaagtaggtgggattataggaatatattattatatttgatttatttattttttgtagagatagggttttgtcgtattgtttaggttgttttggaatttttggttttaagagatttttttatttttttattttaagtgttggtagtataggtggagtcgttatatttggttagtattcgtattttaaagaaattaaggttgagaaaaggaaagtaattagtttaaggttatgtagttagttagtggcgggaggatttaaatttttaaattaggtgttgtaggttttagagtttaggtgttttaataggaagtagatagttgttgttgggtatcgggtttttgcgtgtttatttttcggttttacgttgttttttgttaatagatttagttgttttagggtagtttttgtcgtttatttttagtttgtgggatttagtggtttaggaaaggggtggaaggggatacgattggatttgggtaagtagaaaattacgttttttagtttaaagagatcggtttagtttatagggttttgaacgtttgttgggaagagaggatttttttttttttttgttgggtttggatttaggttcgcggtaggggttattacgtagaaggttatttaagaagtttgtttaagaatagattaggttaggagaggggagttattaggtattgcgggtggtatataagtttcgttatttattttgttagggcgttttttttatgttggagtggatttcggtttcggggatatagggtattatatgtattagtatttagttatatttgcggtcgttgtatatttggataatttggttttgtaaattacgtttttttttgttttgttattgttaattagattttaggttttgttattgagtttttttatagtaatagtagattatagtcgtttatttttagatagttttcggttttattggttatagatttgttttttagaggtaaggttattggtaggtttttagtttttttacggaatgtgaaacgtgttttatttttttagtcgggaaagaaattttttaagagttgagtttatttttttcgtttttttgtaatttttttagtttttagcgtaggtgggggtatagtaagttttttttagtgatggttttaggtgttatttttaatttattttttaagtgtttgttataatttagatacgatttaagcgtggtttatatatcgataatttttattgatagagtttatgatgtttaaaaatgcgggttgggaagtcgggtatagtggtttacgtttgtaattttagtattttgggaggtaaaagcgtgtagattacgatgttaggagtttaagattagtttgattaatatagtgaaagttacgtttttattaaaaatataaaaatattagtcgggcgtgttggtaggtatttataattttagttattcgggaggttgaggtaaggagaatcgtttgaatttgggagacggaggttgtagtgagttgagattgcggtattgtattttagttcgggcgatattgtaagatttcgttttaaaaaaaaagtgtgggttggggttaggtatagtggtttatatttgtaattttagtattttgggaggtagaggcgggtagattatttgaggttaggagtttaagattagtttggttaatatggtaaaatttcgtttttattaaaaatataaaaattagttgagtacgttggtgggcgtttgtaattttagttatttggaaggttgaagtaggagaattatttgaattcgggaggcgaagattgtagtgagttaagatggtattattgtattttagtttcggtaatagagttagatatcgttttaaataaataaataaaaattgttatattttgggtttttattttgtattttatgtatttttgagaatgttttagattattatttgaagtagtgtcgttagaatagtagatattggttatttagagttgttaaattcgtgaggtgtggttagtttcgagaaaaattgcgatatgaaatatatattagatttttaaggttttacggtaaaaatagaaggttaaatattttttttaaaattatgaatttttgtttgtttgagagatgggggttaatttatgttgtttaggttagttttgaagttttgggtttaagcgattttttcgttttggttttttaaagcgttagaattataggcggaagtcgtcgtatttggttttgtttggttttttttataagttgtattttattttagttttgatgtagtggtttggggaaggttatttaagaggttgttgtttttagcggggtgcggtggtttacgtttgtgattttagtattttgggaggtcgaggtaggtgaattatttgaggttagtagttcgagattagtttggttaatatggtgaaattttgtttttattaaaaatataaaaattagttaggggtggtggcgggtttttgtaattttagttattcgggaggttaggttggaggtcgaggttgtaatgagtcgagatcgtattattgtattttagtttgggcgatagaatgagatagtgttaaggaaaaaaaaaaaaggttgttattttggtaaacgttttagtaattattttagttttaagttattttatttatgtatgtatagttttttaatgaattaatttttagaggtgaaatcggcgagttaaaagaaatttggttgaattttgttgatttttgttaaacgatttttagtaggaggggttaatattgaagtatgagaagggggaggagggagtatgttttttttgttattaacgaggaaatttttgaaggagggattttaggattttaaaagagtttgtagtattttttttagtttgatatagagtttatttatttatatttttttttggtgatattatggggaggttttagggaggttggttagtagtaaatttattaaataaggttggaggttttataaaaggaggtagggtttagtggtgtttggttagtttggagggggtggggttttagggggattttttaaggtttagataggtaggaaattagttgtttttttggaagaggaaatttttgtttttttttataagtatgttaaataattgatcgaggtttgggtttagttgggagatacgtttttttttttttttattttaaatatttaagagttgggtaaaaaaattaaagtgttttttataaaagaggattaatatagggagatttttttttttttaaataaatggggttttattttgttgtttaggttatagtgtagtggtacgattatagtttattgtagttttttttaatttttgggtttaagttattttttcgttttagtttttttagtagttgggattataggtatgagttattatatttggttaatttttttttatttttattttttgtagggatggagttttgttatgttgtttaggtagaagatatattttttaataataaaagtagttggtatttgttgttttggtgttttatgttaggtacggttttggttgttgtaacggtttaattatttttttttttataggaaatatatagaggatttttaagtaggaatttatagtcggggttgtttgattttacggtttaaattcgtttttttatcgtatgatattgatttatttttttttagtatataggataaagaataggaaaggagagttgttgtttagaaaattttatagcgttttttttttatttttggagtttagtcgtgcgggtagatagtttatttgtttagttttttttttattttataatggttttttacgtttttttgtttgaacgtggatatggcggtcggttcgttttttagtagtttttattttagggaaagtgtagttatcgtagtttggagataggattttaggagttttttaatggtaattttggagaagatagggaaagatagaagtgaggaattgagatattattttttttttttagattaatggatagatttgtttagtaaatataagttttttatttttttattttgaagttttaaattcgataaaaagaggtgttgtgtttattgggttgggttttgttatgttattttttagagttttataattatttaaaagtttggtaatagttttattgggttatttttatttcgtaaaattttttttagatatataattttgattttttcgacgttgtttgcgtttttttttgttttttatttttagattttttttaatttgtttagttaaaattttttattatttttgtacgttttttttaattttaaattttagggttattttattttttggttaatgttttaacgaagtttttaagtttattttttttgttgttggtgttgttgttttttgagaaggagtttcgttttgtcgttttggttggagtgtagtggtgtaattatggtttattgtagtttggaattttaaggtttaagcgatcgttttaggttttttaaagtgttgttatttcgattaaaatttttaagttattattttaattttttttggtttttgttttcggtaggttttttaagatttttatcgatggaatattttcgtttatttttaattatttttgattttttttaattttgaattttttaagaatcggacgacgttttttacgtttttgaaagtttattttgtttttttttttcgttgatttttattgttttcgtaagattaatttttttttttacgttttatgtattaaagttttttaatcgtcgttttttttattttttaaaacgggtcgttaaaaagggttttatttgagttttttttatcgttttttgttttttttcgttcgtaattttcgtataagtttttaggtagattttagtggttttttttgtagaattttttttcgtttttaaggttttgtttatttttaaggtttcgttttagtatttttggggtcgttacgtttttcgtacgttcggtcgagtttttttttcggttcggttatttagatgggtttttaaatttattagttttttagattttttttttttttcgtttttcgcgggttttcgaagcgtcgttttggttttatttagttttttagtttcggttcgagttcgttttttatttttcgtagttcggagaatacggtcggcgtcgtcgcgttggttatcgtcgtcgtttttagaagtttcgcgtttttgtcgtcgcgacgcgtttgcgtcgacgttatcgtattcgttagtgtttattttcgggaaacgaatttcgtcgtttattggtcggtgcgttcgtcgttcgtgtcgtatttcgacgtttcgtttttagttgttttttcggtatttatattcggatgtagttttattattggttgaatattcgttatttttgattttattggttgtagtcgacgttggttaagcggacggaaaaaaggtcgattttcggtttttttatcgtttcgttcgttttttttttgatttaggtgttgaagttgcgagaagtgaggttgaagttttgtatttcgttttttgtttttttggagtatcggttgggcgaatggatggtttatttgtggtcgagcgcgtttggtagtttttggagtggattttgggattgttttagtttttatgtggtagttttttttattgaaaattgttatttatattttaaatatttaaaatgtaaatgaggttaatttggggttgttatatatagggttttttttcgttttaaaatagagggtaatagtaagtattttattgagatatagtatgtgttaattgataatattgggaggtattaggtttgttttttttttaattttattttttgagatagggttttattttgttatttaggtaggagtgtagcggcggtatttagtttattgtaatttttatttttcgggtttaaacgattttcgtgttttagttttttaagtagttgggattataggtgtttattattacgttcggttaatttttgtatttttagtagagacggggttttattatgttgtttaggttggtttcgaatttttaagtttaggtgattcggtattttagttttttaaagtgttgagattataggcgtgagttattgcgttcggtttaaatttattttttattattattttgagacggagtttcgttttgttatttaggttggagtatattggtataatttcggtttattgtaagttttattttttaggtttacgttatttttttgttttagtttttcgaatagttgggattataggcgttcgttattacgtttagttaattttttgtatttattagtagagatagggttttatcgtgttagttaggatggtttcgattttttgattttttgattcgttcgtttcggttttttaaagtgtaggaattataggtatgagttattttgtttagtttttttttttttttttttttttttttgagatagtttttttttatcgtttaggttggaacgtagtggtgagatttgggtttattgtaatttttgttttttgggtttaagcgatttttttgttttagtttttcgagtagttgggattataggtgtacgttattatttttagttgatttttgtatttttagtagacgtagggttttattatgttggttaggatggttttaatatttgtgattcgtcggtttcggttttttaaagtgttgcgattatagacgtgagttataagtcggtttttatattttttatttatatttttaacgtataatgggttggttaggtgtggtggtttacgttcgtaattttaatagtttgggtagttaaggcgggtaggttatttgaagtaggagtttaagattagtttgtttaatatggtgaaattttgtttttattaaaaatataaaagttagttaggtttggtggtatatgtttgtaattttagttattcgggaggttagcgtaggagaattgtttgaatttaggaggtggaggttgtagcgagtcgagattatgttattatattatagtttgggtgacggagggagattttattttaaagaaaaaaaagtggtagggtatggtggttaacgtttgtaattttagtattttgggaggttacggtgggtagattacgaagttaggatattaagattattttggttaatacggtgaaattttgtttttattaataaatataaaaaattagtcgggtatggtggcgggtgtttgtagtttcggttattcgggaggttgaggtaggagaatggcgtgaattcgggaggcggagtttgtagtgagttaagattgagttattgtattttagtttgggtgatagagtaaagattgttttaaaaaaaaaaaaaaatttagtttttatatattattttaacgtttgtattattaaaaaagaataggattcggtatggtggtttatatttgtaattttagtattttgggaggttgaggcgggttgattttttacggtcgagtttgagattagtttggttaatatggtgaaattttattttatttaaatatataaaaattatatagatttggtgataggcgtttgtaattttagttattcgggaggttgaagtataagaattgtttgagtatttgaattcggaggtagaggttatagtgagttaagattataatattgtattttattttgggcgatagagtgagattttcgaaatatagtaattcgttattttgattgttggaaatagcgttagttatagttttaatttaaatgcgatagttaaattaaattttaggtatatttatatgtgggtaaaattttagttgaggtttggttttgataatgtagggttagagttgttttcgtttttgtcgagaattttatagttttattttatagtttttatttgtttttttgaggatagagtaaaaggcggaaaatgattatgttaattttattagtattgataagattaggtttttttatattttaggtattatttagaaaaataaatagttttttaagttattggcgtttatatttgaaattttagtattttgggaggttgaggtagaaggatcgtttgagttcgggaaggagattagtttgagtaatatagtgagattttattattataaaaaaagtaaaaattaggttagtatagtggtttacgtttataatttttagtattttgggaggtcgaggcgggtagattatttgaggttaggagttcgagattaattaggttaagtaaaattttgttttaaaataaataaaaattagttgggtatggtggtatatgtttggagttttagttatttggtaggttgaggtaggagagtttaggaggtggaggatgtagtgagttgattgtattattatatttatttgggagatagtaagattttgtttttaaaaaagtgtttataaggtcgggtatagtggtataattttaacgttttgggaggttaaggcgggtggattataaggtcgagtgattaagattatttaggttaatatggtgaaattttatttttattaaaaatataaaaattggttgggcgtggtagtatacgtatgtaattttagttatttaggagttcgaggtagaattgtttgaattcgggaggtggaggttgtagtgagtagagatggtgttattttattttagtttagtaaacggtgagattttattttaaaaaaaaaaaaaaaaaaaatgggtttttaataaattagttaggattggggtgattatagaaaattttgatggtagatagaatttgtgagttcgttagtaattcggaaagttgttgaaatttgcgaagtttaatttagagtttttcgttttatagggttatttaaatgcgtttaaagtgatatttcgtaattttttgtcgtattgattttattttaaatgtttagtagattcgcgtagttggtagttgtttttttgaatgatataggggt

SEQ ID NO: 47 - DNA, 5976 bp, Artificial Sequence
  chemically treated genomic DNA (Homo sapiens)
tagtatttttaatttttatatttttagtagagatggggattttattatgttggttacgttggttttgaatttttttttttttttttttttttgtgatagagttttttgttgtttaggttggagtgtagtggtagtgatttttgtttattgtagtttgtttttattttttagattttagcgatttttttgttttaggtttttaaatagttgggattataggtgtgtgttatcgtgtttagttaatttttgtatttttagtagagataaggttttattatgttggtaaggttggtttggaatttttgattttaagtgattcgtttattttagttttttaaagtgttgggattataggtatgagttattgcgtttagtttatttattgatttattgagatgaggttttattatgttgtttaggttggtttgtaattttgagattaagtaatttatttattttaattttttaaagtgttaggattataggcggtgagttatagttggttatattttattttatttatttattttttgagatagagttttgttttgttatttaggttggagtgtagtggtattattttggtttattgaaattttcgttttttgggtttaagcgatttttttgttttagttttttaagtagttgggattaaaggcgcgagttattacgtttagttaatttttgtatttttagtagagacgggggtgttattatattggttaggttggtttcgaatttttagatttcgtgatttgtttgtttcggttttttaaagtgttggaattatagtatgagttattgtatttggtttatttatttatttttttgagatatagtttttttgtgttgtttatgttggagtgtagtggtgcgattttggttttcggtaatttttgtttttcgggtttaagcgatttttttgttttagttttttaaatagttgggattataggcgttcgttattatatttagttaatttttttgtaattttagtagagacggggttttattatgttgggtaggttggtttcgaatttttgattttaggtgatttgtttgtttcggttttttaaagtgttgggattataggtttgagttattacgttcggtttatttttttattttttgagatagagttttgttttatcgtttaggttggagtgtagtggcgtgattttggtttattgtaatttttgttttttaaatttaagggatttttttgttttagtttttaaatagttgggattataggcgtttacgattacgtttggttattttttgtatttttagtagagacgaggtttttttatgttggttaggttggtttcgaatttttgattttaagtgatttgttcgtttcggttttttaaagtggtaggattataggtatgagttattatgtttggttttatattttaaaataaaataattagattattatttattgtttagtggaattgaaatattatagtgatggtcgggtacggtgttttacgtttgtaattttagtattttgggaggttgagttgggtggattacgaggttaggagtttgagattagtttggttaatatgttaaaaatttatatttattaaaaaaaaaaaatataaaaaatataaaaaattagttgggtatggtgttgtgtgtttgtaattttagttgtttaggaggttgaggtaggagaatcgtttaaattcgggagtgggaggttgtagtaagtagagattgtgttattgaattttagtttgggcgatagagtaagattttattttaaaaaaaaaaaaaaagtataaattagtttttattagttgggaattatttttttttttttttattattttttttttttttgagtttttattattattttatttttttataaattttatgtttttatatttgaaagttttttattgattaattttttatatttttttgtatatatatgtatattaattgagatgaaaaatattttttttgtgattgtaagattttagttgttaaaaattattttggaggagttattgttataattattataagaatagaatgtttttataaatatgtgatcgtatatttttttttttttttttaagacggagtttcgttttgtcgtttaggttggagggtagtggcgcgatttcggtttattgtaagtttcgtttttcgggtttacgttatttttttgttttagttttcggagtagttgggtttataaggcgtttattattacgtttagttaatttttttttttttttttttttggtatttttagtagagatagggttttatcgtgttagttagggtggtttcgattttttgttttcgtgatttttttgtttcggttttttaaagtgttgggattataggcgtgagttatcgtgtttggtcgatcgtaaatatttttataattgttaaaaagaaatatttaataagatagtagtttgggagtggcggtttacgtttataattttagtattttgagacgttgaggtgggaagattgtttgaggtaaggagtttaagatttatttgggtaatatagtaagattttgtcgttataaaaaatttttttttttttttttttgagatagagttttgttttgtcgttaggttggagtgtagtggttgattttagtttattgcgattttcgtttttcgggtttaagcgatttttttgttttagtttttcgagtagttgggattataggcgcgtgttattaagtttagataatttttgtgtttttagtagagacggggttttattatgttggttaggttggttttaaattttcgattttaggtgattcgttcgtttcggttttttaaagttttgggattataggtatgagttatcgcgtttagtttttataaaaaattttttttaaaaaaattagttaggtgaggtggtgtgcgtttgtagttttagttatttgaggtgggaggatggtttgagtttaggaatttgaggttatagtgagttatgatcgtattatcgtattttagtttgggtgatagaataagatttttttttttttttttttttttttttttttttttttttttttgagataatttcgttttgtcgtttaggttggagtgtaatgacgcgatttcggtttattgtaattttcgtttttcggattcgagcggtttttttgttttagttttttgagtagttggagttataggcgtttgttattacgtttagttaatttttttgtatttttagtagagacggggttttattatgttggttaggatggtttcgattttttgattttatgatacgtttatttcggatttttaaagtgttgggattataggcgtgaattatcgcgttcggtcgattttgtatttaaaaaaaaaaaagataaaagaaaggaaaaaaaaaaaaaaaaaaaagaaaaggtggtatttatggtgttttggtgaaagaaatagggtatatttttttttattttaaataggtaagattatttttaggagattttatggttgagaattatatttttgaggggggaggggaaaaaagagaattattttttttttttttttttttaagagggtgattttattgtaaaaggagaagtgaagaatgagaatttgtattgtaggtgtttttttaggaagattaattttgggaaagttgaggtttttgaaattaaattttttatattttttaagttttagttttcgcggagagtttttatgttttttattttgaaagttgtagattttgacgattggagagaagtgatgtgggattgtttaacggacgggtgtttgcgattttaggatttagcgttagggatttaataagttttgtgattttagttaagtggtaagatgtttattatttgtggaaatgggaattttagcgattgggattttgttaatttttttggtttttttataagtttatttttggatttagttttgtttttacgagtttttttagtttttttaaatataacgaggtgggtattaaatttgtttttttattttttatttttttttttttttttttcgaagaggaggaggaggagatttaaagtattttatgagttttatttcgttttatagtagttttcgtagcggtaatttgtataaatttttttttaagttttattttattatcgtttattcgtagattttaggttttttacgataaagtacggttatttggttagtatagacggtttttcgaggattttttttggagaagaattatttaggttttaacggtttggttggttattagttttgtggtgaagtttgaaaagtaaattagtaataatagtaataataataatatttttatggcgcgttgtgtttatttgtacgtatgtgttataacgatcgcgggacgtagtatttggtagtagaaatagttgttggatagcggtaaggagcgcgtcgtttttgtaggggaaggggttgggttagtcgaataagtcgtggaaatgggaatttgggggataggaaagtagggttagatagtttgttaatagtttaattgaaagaaaaggttttattttttttttaagagatttttgtttttttttgaaattttgtatagttttggaaagtttaatttttaatttattttgttcggtttttttgtttttttttggaaacgaggttcggttttttttacgcgttatttttcggcggttgggttttaggtaggaagtttttgattggcggagtcgtagaagtatcgggtgaaaagagttttattggttgcgtatcggagttcgggcgtagttagtgtcgtacggtaaaatggcggtttttagttgttttgggacgtttgggttcggggagataaatttcgatttggaagagatcgttgattatgtgggtcgtattggaggtgttcgcggggcgggtttattgttattttcggttataggaagtttgtgtttcgtacgataatatggcggcgtttagttgtatgaaggcggaaattttgtgattttcggttcgtagtggggtttgcggtgggagtgggaaggaaggcggagggaattatgcgaggttttgagaattgcggcgagggtcgtttcgagagacggtttttgaggtgggggtcggacggtgcggggattagaggcgggggcggggatatagagggagaggtattggggagagttgggcgttgagtttgaggggaaagttgtggtatttttttgtttttgaaagggagtggagcggtcgggggttgaattgggggagggggatttggcgggaagcgtatttagcggatcggtcggatttacggttgggatttaagaggaatcgcgagagcgtagcgcggtgcggggggatttttgattagttacgggttatcgagagaatggggaaaattagggtggggtgaaagggaggggatttgggtaaaatatttttaatttaaagttttagtttgaggagatttatcggagggtgaaatatggagataatttaaggaggagaaaagagaacggattgttgggagggaattttttttattttagagagtttaggagttggggtgattatttaggatagggtgggtgtggggttgatttgtttgagagtagagggggtaaatatatgaggtggcgtttataggagtgtgttgtttgtgtaagggggtgttaggacgatttggggtgtagtgtgggaggaagaattaatttgttaattttaagaaataggggggaaatgtaatagaaagatcggaaatcgacgtgaggggtggagtagaaggtggtaatttaaggtgtgggggtggtttgttttttttttatattatttgaagggttttaaaaagtatatagaattaatggttattgaaattaggtggtgaagatagtgttggttagggttggatgttattgaaatttaaggagtttagaaaatgtgtgaggtgaagggatggggttatgttggaggggtttattttgaggttttatttttttttagt

SEQ ID NO: 48 - DNA, 5976 bp, Artificial Sequence
  chemically treated genomic DNA (Homo sapiens)
gttggaaggggatggggttttagaatgagtttttttagtatagttttatttttttattttatatattttttgaattttttgggttttagtaatatttagttttgattaatattgtttttattatttgattttaataattattagttttatatgttttttggggttttttaagtggtgtggggggggggtaaattatttttatattttaagttgttattttttgttttattttttacgtcgattttcggtttttttgttgtattttttttttattttttagagttggtaagttgatttttttttttatattgtattttaaatcgttttgatatttttttgtatagataatatatttttgtgggcgttattttatgtgtttgttttttttgtttttaaataagttaattttatatttattttattttgaatgattattttaatttttagattttttgaggtgaaagaggtttttttttaatagttcgttttttttttttttttttgaattatttttatattttatttttcgatgagtttttttaaattggggttttaggttgaagatattttatttaagtttttttttttttattttattttaattttttttattttttcggtgattcgtaattgattaaaagttttttcgtatcgcgttacgttttcgcgattttttttagattttaatcgtgggttcggtcggttcgttagatgcgtttttcgttaaattttttttttttagtttagttttcggtcgttttatttttttttagggataggaaggtattatagttttttttttagatttagcgtttagttttttttaatatttttttttttatattttcgttttcgtttttgattttcgtatcgttcggtttttattttagaaatcgtttttcgaggcgattttcgtcgtaatttttagaatttcgtatggtttttttcgtttttttttttatttttatcgtaggttttattacggatcggaagttatagagttttcgtttttatgtaattaagcgtcgttatattgtcgtacggaatataggttttttgtggtcggaggtgatagtaggttcgtttcgcgaatatttttagtgcggtttatatagttagcggttttttttaggtcggagtttgttttttcgaatttaggcgttttaaagtagttgggggtcgttattttgtcgtacggtattggttacgttcggatttcggtgcgtagttagtggagttttttttattcggtgtttttacgatttcgttaattagaaattttttgtttggggtttaatcgtcggagagtagcgcgtagggaggatcgagtttcgtttttaaggaggggtaggggaatcgaatagggtggattaggaattgggttttttaaagttgtgtagagttttagggaagggtagaagttttttaaaagggaagtaaaatttttttttttagttgggttattggtaagttatttggttttgtttttttgttttttaggtttttatttttacggtttattcggttgatttagtttttttttttgtaagggcggcgcgttttttgtcgttgtttagtagttgtttttattgttaggtgttgcgtttcgcgatcgttataatatatgcgtataaatgagtataacgcgttataaaagtgttattgttattattattgttgttgatttgttttttaagttttattatagaattaatgattagttagatcgttgggatttgaatggtttttttttagagggggttttcgaagggtcgtttgtgttgattaggtggtcgtgttttgtcgtgggaggtttagggtttgcggatgggcgatgatggggtggggtttggaggagagtttgtgtaaattgtcgttgcgagggttgttgtgaggcgaaatgaggtttataaaatattttgggttttttttttttttttttcggggagaggggaaaaaagaatgaaggatgaagaaatagatttgatatttatttcgttgtgtttagggaggttggagggattcgtggaggtaaggttgggtttagaggtgagtttatgaggaaattagaaagattaatagggttttaatcgttaagatttttatttttataagtggtgggtattttgttatttaattagggttatagagtttattagatttttaacgttgagttttagaatcgtaaatattcgttcgttgaataattttatattatttttttttagtcgttaaagtttatagtttttaaaatggggaatataaaaatttttcgcgaggattgggatttggaagatgtaagggatttaattttaagaattttaatttttttaaaattggtttttttaaggaaatatttgtagtataggtttttattttttatttttttttttataatagagttatttttttaagaaaaaaaaaaaaaagaatagttttttttttttttttttttttttaaaagtatagtttttaattatgaaattttttgggggtaattttatttgtttaaaataaagggaaatgtattttgttttttttattaaggtattatgaatattatttttttttttttttttttttttttttttttttttttgttttttttttttttaaatgtagggtcggtcgggcgcgatggtttacgtttgtaattttagtattttgggggttcgaggtgggcgtattatggggttaagagatcgagattattttggttaatatggtgaaatttcgtttttattaaaaatataaaaaaattagttgggcgtggtggtaggcgtttgtagttttagttatttaggaggttgaggtaggagaatcgttcgaattcgggaggcggaggttgtagtaagtcgagatcgcgttattgtattttagtttgggcgatagagcgagattattttaaaaaaaaaaaaaaaaaaaaaaaaaaaaaggaaaaaaaaagggttttgttttattatttaggttggaatgcggtggtacggttatagtttattgtaattttaaatttttgggtttaagttatttttttattttaagtagttaggattataggcgtatattattttatttggttaatttttttaaaaaaagttttttgtggaggttgggcgcggtggtttatgtttgtaattttagaattttgggaggtcgaggcgggcggattatttgaggtcggaagtttgagattagtttggttaatatggtgaaatttcgtttttattaaaaatataaaaattatttgggtttggtggtacgcgtttgtagttttagttattcgggaggttgaggtaggagaatcgtttgaattcgggaggcggaggtcgtagtgagttgagattagttattgtattttagtttggcgatagagtaagattttgttttaaaaaaaaaaaaaaaaaggttttttatagcgatagggttttattgtgttgtttagatggattttgagttttttgttttaagtaatttttttattttagcgttttaaagtgttgggattatgggcgtgaatcgttatttttagattattattttattaaatatttttttttaatagttataaaaatgtttacgatcggttaggtacggtggtttacgtttgtaattttagtattttgggaggtcgaggtaggaggattacgagggtaggaaatcgagattattttggttaatacggtgaaattttgtttttattaaaaatattaaaaaaaaaaaaaaaaaaaaattagttgggcgtggtggtgggcgttttgtagatttagttatttcggaggttgaggtaggagaatggcgtgaattcgggaggcggagtttgtagtgagtcgagatcgcgttattgttttttagtttgggcgatagagcgagatttcgttttaaaaaaaaaaaaaaaagtgtacgattatatgtttataagaatattttgtttttataataattgtaatagtaatttttttagaataatttttaataattagagttttataattataagaaagatattttttattttaattaatatatatgtatatgtaggaagatgtaaaagattggttaataaaggatttttaagtataaaagtataaagtttgtggggaagtggagtagtagtaggagtttaaggaaaaaagaggtgatgaaagaaaaaaggaatgatttttaattggtaagaattaatttatattttttttttttttttgagatggagttttgttttgtcgtttaggttggagtttaatggtataatttttgtttattgtaattttttattttcgggtttaagcgatttttttgttttaattttttgagtagttgggattataggtatataatattatgtttagttaattttttgtattttttgtattttttttttttagtggatatgggtttttggtatgttggttaggttggttttaaatttttgatttcgtgatttatttaatttagttttttaaagtgttgggattataggcgtgaagtatcgtgttcggttattattatgatattttaattttattggataataaatggtgatttaattgttttattttaaaatgtggggttaggtatggtgatttatgtttgtaattttattattttgggaggtcgaggcgggtagattatttgaggttaggagttcgagattagtttgattaatatgaggaaatttcgtttttattagagatataaaaaatagttaggcgtggtcgtgggcgtttgtaattttagttatttgggagttgaggtaggggaattttttgaatttgggaggtaaaagttgtagtgagttaagattacgttattgtattttagtttgggcgatagagtaagattttgttttaaaaaataaaaaaataggtcgggcgtggtggtttaaatttgtaattttagtattttgggaggtcgaggtaggtagattatttgaggttaggagttcgagattagtttgtttaatatgatgaaatttcgtttttattaaaattataaaaaaattagttgggtgtagtggcgggcgtttgtagttttagttatttgggaggttgaggtaggagaatcgtttgaattcgggaggtagaggttgtcggaagttaagatcgtattattatattttagtatgggtaatatagagagattgtgttttaaaaaaataaataaataggttaggtgtagtggtttatgttgtaattttagtattttgggaggtcgaggtaggtagattacgaagtttaggagttcgagattagtttggttaatatggtgatattttcgtttttattaaaaatataaaaattagttgggcgtggtggttcgcgtttttagttttagttatttgggaagttgaggtagaagaatcgtttgaatttaggaggcggagattttagtgagttaagatggtgttattgtattttagtttgggtgatagagtaagattttgttttaaaaaataaataaataaaataaaatgtggttagttgtggtttatcgtttataattttagtattttgggaagttgaggtgggtggattgtttgattttaggattatagattagtttaggtaatatagtgagattttattttaataaattaataaataggttgggcgtagtggtttatgtttgtaattttagtattttgggaggttgaggtgggcggattatttgaggttaggagttttagattagttttgttaatatgatgaaattttgtttttattaaaaatataaaaattagttgggtacggtggtatatatttgtagttttagttatttgggggtttgaggtaggagaatcgttagaatttgggaagtggaggtaggttgtagtgagtagagattattgttattgtattttagtttgggtaataggagattttgttataaaaaaaaaaaaaaaaaaaagagtttaagattagcgtggttaatatggtgaaatttttatttttattaaaaatataaaaattaggggtgttg

SEQ ID NO: 49 - DNA, 6192 bp, Artificial Sequence
  chemically treated genomic DNA (Homo sapiens)
gttttaatcggagaaatgggaaattggattgattaagatttgaaaatgaaataggtaattgttgaagagtattggtttatttaaaaagcgtgtatttgttttttgttagatagttatagagtttgttatgaaaagtttaagttttggttaggtattgtagtttacgtttgtaattttagtattttgggaggttgaggtgggcggattatgaggttaggagattaagattattttggttaatacggtgaaattttatttttattaaaaatataaaaaattagttgggtatggtggcgggcgtttgtagttttagttattagggaggttgaggtaggagaatggcgtgaatttaggaggcggaggttgtagtgagtagagatcgcgttattgtattttagtttgggtgatatagcgagattttgttttaaaaaaaaaaaaagaaaagtttaagttttttttttaggttgttagtatgttttgtggtaattttatttttattagttttggaaaggagggtaaaggagaagtagagttgaaaattaaataagtgatggttatgtttttttaaaggattttagatttttttttattaaatatatatatagagagggtaaatttgtaaaattaaaagaatttttgggtataatagtggttttaagtggtaagatttttagtattgtttatagtattggtaaattaaatgttttataagaattaggaatagagtcgggtacggtggtttacgtatataattttagtattttgggaggttgaggcgggtagattatttgaagttaggagtttaagattagtttggttaatatggtgaaatttatcgttattaaaattataaaaattagttaggtgtggtggtaggtattcgtagttttagttatttgggaggttgaggtaggagaattgttcgaattcgggaggtagtgagtcgagattgcgttaatgtattttagtatgggcgatagagagagatttcgttttaagaaagaaaaaagaattaggaattgaggatattttttaattttagtttgtgggtatttttaatataaaataatttagagaaatttagattttaagatgttttagtattttagtaaattaaatgtggtaaggtaagaaaggagaggtttttttttcgagatatttgttaaattttagaatatttgatagtgagaaggttagaattagtttttgttattttttatgttttataattaagatattttttttttgaattatttatattgttaatagaaattggtatgggggaatatattaatttttttaagtttaatttttgtaatagacgtgtagaataagatagtaagaaatattaagcggtggttttttgtttttgaaggaagtgaaatattagtaagttgttgaaaatttttagaggtgttttaaggagatgggagaggaggaatgaggttttaagttgaaattattttttttttttttattttaattttaattaaatttaaaaatgtatggatgattagtggagttatataggtttaatataggtttaatagagtatacgatttggggtatgttataaatttttagtatttatttttgtgaaatggaggttagtagtttgtattttataaaggttgtagtgaatattaaacgagataatagatgtaatttgtgtttaatatgatattatataggtagttaaatgtaagatgttttttagtttttttttttttattttattttattttatttttggattataaattttttcggagattttattatttattgtttttcggtcgtagaggtataggcgttaacgttggtttttatggtttttttattggagtgggatttgtttgaatttgtaggtgaaaagttagagcggagttttcggttaataaaattaaatttagggaagcgaggatgggtttttagttaaaagtttggtggcgtttgttagttatagtgcgttttttttttattaacgtattgagagggttcgattagattatttttgattatttaatttgacgagagaagcgtaaaggtgattatagatgaagaggttggtagtcgttttaggaggttgaggtcgtgagggagtgggaattttaatggaaataggttttttttcggaggggatagtcgggaacgatcgatttatttttttttttttaagttttcgtagtttaaggttggggattttttaagggtttcgttattttttttaataagtttaagtgggattagaggtgttggtaggcgggaagtggggattcgggggtatagttaaatattagagttcgggtttcggaatgtggttaaagaggggttatcggggggaggggtcgggtggggaggatttggggaggggcggggtttaggagggggtaagaggtcggggtttttagtttcggagattcggggtttttattcggtttttagtcgtatgttgagcgttttttttagtcggggttttcgtcgtatagcggggtagttttattttttttatttggttcggttgttttgtttgtttcgaggacgttatttttttgaggtttgattaattaatcgtcgttgggcgaggttttttttaggcgttttcgttttcgttttttcgtttagattaaggtagtcggaatagagtttgtcgatgtaggggattggggtagaggggtggagttcgggtgttcgggttattttgtatagttttcgttaagattttgttttttaggaagattttaagtttatattttttttgcgttgttatatgtgtattattttggttttgttttttttttttgagacggagtttcgtatttgttgtttaggttggagtgtaatggcgcgatatcggtttatcgtaattttagtttttcggttttaagtgatttttttgttttagtttttcgagtagttgggattgtaggtatgcgttattatgttcggttaatattgtatttttagtagagatggagtttttttatgttggttaggttgttttcgaattttcgattttaggtgatttgttcgtttcggttttttaaagtgttgggattatagaagtgagttatagcgttcggtttatattatttttattgagttaatttttgtttatttttatagtgttatgggtatatttagggatttgttaatggatgaatgcgaagaaatttggaaattaatttttagatattagtttagttttatttattgagtgtttattatatgttagggattttggtaggttttgaaataaaaatatttaagatttaatttttatttttacgtttaggttaaatatatttataattatagtattatggggataggattcggataagtgtgtaggtttattgggagaatataaaagggggtattttgaagagaagaggtttttataaaacgttattattttatattggttgaattgttagatttttttaattgttagattttaaattaaatattggacgggagtagtggtttatatttgtaattttaatattttaggaggttaaggtaggaggattttttgagtttaggaggttgaggttgtagtgaattatgattatgttattgtattttagtttgggcgatagagcgagattttgtttaaaaataagataagaaaataaaaaatgaaattatatgaaaaaggatatatatattagagttaatcgttagtttttattatagttgtgttttgattaatatagattgtttaaaagggatgatttaatgaataattttttttattaaacgttgttttaaatgtttaaattttttttgagataatatttaatttttttttttacgttttttttgtttgtttttgtttttgtttttgtttttgtttgagacgaagttttgtttttgacgtttaggttggagtgtaatggtgcgatttgggtcgattgtaattttcgtttttcgggtttaagcgatttatttgttttagttttttaagagttgggattataggcgtgcgttattacgttcggttaatttttgtatttttagtagagatagggttttattatgttggttaggttggttttaaattattgattttagattatttgttcgtttcggttttttaaagtgttgagattataggggtgagttatcgttttcggggtttttgtttacgtttttataaataaaatatgaggtgggaggattgtttgagtttaggagattaaaattgtagtgagttattatcgcgttattgtattttagtttgggagatagagcgaaacgttgttttaaaaaaagaaaaaagaaataaggaaggaaagtgtttttcgaatgaataaatatgagtagataattatttttagtttatataaaatgtttttttttaagagaggaattttttgattatttttattattatttttttaattttagatgtttattttttaggaggaaaaaaataaatttttttatagtagtagtattaaaataaagatgaatatgttgttaagaggtatttgaataatttttaatagtgtcgagtcgtattttttttttttttttcgatgtatttgagattttaatgtttattatatttatttaagcgttttgttttgagattttaaattaatttgtatagttgaagtaggaaatagaatgggtggaaatatgcgggtgtttgtattagtattatgtattttatatgcgaataggaatgttttaaaaatttaatatagtatatatgcgtgtgtatcgttatgtaaaataagtttttattggttttatatttgaacgcgcgaatgtagtttttaaaagttaaaaataatttttaggttgaatcgcgcgatagaacgaaagcggttttaaatttagagattatagttttcggtatgtttcgacgttatacgtgattagcggtaattagaattatatttttcggcgtgttttggttttacgtgtgatttgttgcggaacgaattatatttttcggtaggttgcggaagggggtcgagtagaaggatcgtcgtttcggtttttcgcgatttttcgaaggtgggtaggttttattttgtggaggatggaggtgatcggggacgtcggggtattagaatttggcgagattcggattttaaagtcgtgtttgttgcgtcgtaattatagtcgcgaatagtacggcgtggtcgttttttgtttcgaagatttgaggagtaagggttggttcgggatttcgggcgagggtgtgggggagttagggtcgggtgaggacgttcggcgggggcgaggcggggttaggagaggcgatttggggatttttgtatttcgggtggaggtttgggatagaaacggttcgagtgggtatagcgatttatagatttaaggcgtttgagcgtaattaatttcgtgtgagattttacggtggtgggaagatagttaggaagtaatgtgtaaattaagttagattcggtttaggttttttgtttgaaattatttcgatgttggattaaacggattttattgggtttttgttatttcgttatatttagatggtataagaatttttagttgagtttacggcggtgtggggaggggtttttatcgttcgttttggtaggaatttatgtaggaaagagggagttgttattgattatttttggaggtttagataaggaacgtgagttgtaagtgacggagtcgacggaagtttcgagttcggttttatatttttattagttgtttggttttgtatttaattagtttttaatttttagtttttttattagtaaattgggtataatatttatagttttgttttaaagggttgttggtttttttaaataagatgatatatttaagtgatttataagttttattagttagtagtaataaatcgtttatttaaagaagttttataggttatatgtgtgagttagttttaggtatgtagttatagtgtgtgttagagggtatagttgtttttttttagttattaatagaaattatatggaaatttttagagatttatgaatagttaaagtattataaatgttttggtaatatggattttgtatataagtatttatgtatttttttttttgatattagattattttatttttaatttttttttagtgtcgtggttggatgtgcgtggtatagaggttggtgttttttgtagtttagcgtatatatgttttgttgttttattgggtggta

SEQ ID NO: 50 - DNA, 6192 bp, Artificial Sequence
  chemically treated genomic DNA (Homo sapiens)
tattatttaatagaatagtaaggtatgtatgcgttggattgtagagaatattagtttttgtgttacgtatatttagttacggtattgaaggggaattagaagtaaagtaatttaatgttaggaaaaaaaatatataaatgtttatatgtaaaatttatgttattaaagtatttataatgttttggttgtttatgggtttttgaaaatttttatatgatttttgttggtgattgagaggaagtaattgtgttttttgatatatattgtgattatatgtttggggttggtttatatatgtaatttgtaaaatttttttgggtaagcgatttgttgttattggttaataagatttgtaagttatttaaatatattattttatttgagagaattaataattttttgaagtagggttataaatattatatttaatttgttgatgagaaaattgagggttgagagttggttaagtgtaaggttaagtagttggtaaaggtatggggtcgggttcggaattttcgtcggtttcgttatttataatttacgttttttgtttggatttttagaaatggttagtagtagtttttttttttttgtataggtttttgttagagcggacggtggaaatttttttttatatcgtcgtgggtttagttgggggtttttgtattatttgagtgtggcggagtggtaggaatttagtggggttcgtttggtttaatatcgaagtgattttaggtaagagatttaagtcgagtttggtttaatttgtatattgttttttggttgtttttttattatcgtggagttttatacgagattaattacgtttaagcgttttaaatttgtaaatcgttatgtttattcggatcgtttttgttttaagtttttattcgagatataagaatttttaagtcgttttttttgatttcgtttcgttttcgtcggacgtttttattcggttttggtttttttatattttcgttcggggtttcgagttaatttttgttttttaggttttcgaggtaggaggcggttacgtcgtgttgttcgcggttgtagttgcggcgtagtagatacggttttagagttcggatttcgttagattttggtatttcggcgttttcggttatttttattttttataaggtgggatttgtttattttcgagaagtcgcgggaggtcggagcggcggtttttttattcgattttttttcgtagtttgtcgggagatgtagttcgtttcgtagtaaattatacgtgagattagggtacgtcgggaaatgtagttttagttgtcgttaattacgtgtggcgtcgaagtatgtcggaaattgtagtttttgggtttaaagtcgttttcgttttatcgcgcgatttagtttaggagttgtttttaatttttaggagttgtattcgcgcgtttaaatataaggttaatagagatttattttgtatgacgatgtatacgtatgtatattgtattgaatttttagagtatttttattcgtatatgagatgtataatgttaatatagatattcgtatgtttttatttattttattttttgttttaattgtgtaaattagtttggggttttagaataaaacgtttaaataaatatagtaagtattaaagttttaaatgtatcggagaggaaaggggaaatgcgattcggtattgttggagattgtttagatgttttttgataatatatttatttttgttttaatattgttattatggaaaagtttgtttttttttttttgaaaaataaatatttaagattaaaagaatagtaataaaaatgattaaaaagttttttttttaaaagagggtattttatgtaaattagaagtaattatttgtttatatttatttattcgggggatattttttttttttgttttttttttttttttttgagatagcgtttcgttttgttttttaggttggagtgtagtggcgcgatgatggtttattgtagttttgattttttgggtttaagtaatttttttattttatattttgtttataaaaacgtgggtaagggtttcgggggcggtggtttatttttgtaattttagtattttaggaggtcgaggcggatagatgatttgaggttagtagtttgagattagtttggttagtatggtgaaattttatttttattaaaaatataaaaattagtcgggcgtgatggcgtacgtttgtagttttagtttttgggaggttgaggtaggtgaatcgtttgaattcgggaggcggaggttgtagtcggtttagatcgtattattgtattttagtttgggcgttaggagtaagatttcgttttaagtaaaaataaaaataaaagtaaaaataaataaaaaaaacgtgggagaggaaattggatattattttaagaaaagtttagatatttaaaatagcgtttagtaggaggaattatttattaagttattttttttaagtagtttatattgattaaaatataattataataggagttggcggttaattttaatgtatgtatttttttttatataattttattttttatttttttattttatttttagataaggtttcgttttgtcgtttaggttggagtgtagtggtataattatagtttattgtagttttaattttttgggtttaagggatttttttgttttggttttttaaagtgttgggattataggtgtgagttattgttttcgtttaatatttaatttaaaatttaataattaaaaaaatttaataatttaattagtgtaaaataatgacgttttgtagaagttttttttttttaaaatgtttttttttatgtttttttaatagatttgtatatttattcgagttttatttttataatattgtaattgtaagtgtgtttggtttgggcgtgggagtagggattgagttttgaatgtttttattttaaggtttattaaagtttttagtatatagtaggtatttaatgaatggaattgaattgatgtttaaaaattaatttttaagttttttcgtatttatttattggtaagtttttaaatgtgtttatggtattgtggggatgggtagagattaatttaataagaataatatgggtcgggcgttgtggtttatttttgtaattttaatattttgggaggtcgaggcgggtagattatttgaggtcgggagttcgagagtagtttgattaatatggagaaattttatttttattaaaaatataatgttagtcgggtatggtggcgtatgtttgtaattttagttattcgggaggttgaggtaggagaattatttgaaatcgggaggttgaggttgcggtgagtcgatatcgcgttattgtattttagtttaggtaataagtgcgaaatttcgttttaaaaaaaaaaagtaaaattagaataatatatatataataacgtaaagaagatatagatttgggatttttttggaaagtagagttttaacggaaattatgtaaggtgattcggatattcgggttttatttttttgttttagttttttatatcgataggttttgtttcggttattttagtttgggcgggagggcgagagcgagggcgtttgggagaaatttcgtttagcggcggttgattagttaggttttagaaagatggcgttttcggagtaggtagagtagtcgagttaggtaaggggagtgggattgtttcgttgtgcggcggagatttcggttggagggggcgtttagtatacggttgggagtcgggtagggatttcgagttttcgaagttggggatttcgattttttgtttttttttgagtttcgtttttttttaggttttttttattcggttttttttttcggtgatttttttttgattatatttcggagttcgggttttggtgtttggttgtgttttcgggtttttatttttcgtttgttagtatttttggttttatttgagtttgttggggagggtgacgggatttttgggaagtttttagttttgagttgcgagggtttgagaaggagaggatagatcgatcgttttcggttgtttttttcggggaggggtttgtttttattagggtttttatttttttacggttttagttttttggagcggttgttagtttttttatttgtggttatttttgcgtttttttcgttaagttggatagttagaaataatttagtcgagtttttttagtgcgttgataggaaagggacgtattgtgattaatagacgttattaagtttttggttgaggatttattttcgtttttttgggtttggttttgttggtcgagggtttcgttttagttttttatttgtagatttagataaattttattttaataaggggattataaggattagcgttgacgtttgtgtttttgcggtcgggaggtagtggatgataaggttttcgaaggggtttatagtttaaaggtggggtagggtggggtgaggagaaaagggttaagagatattttatatttaattgtttgtgtggtgttatgttgagtataaattatatttattatttcgtttagtgtttattataatttttatgaagtgtaggttattaatttttattttatagaaatgaatattaagggtttgtgatatgttttaaatcgtgtgttttgttgagtttgtattgaatttgtgtgattttattagttatttatatatttttgagtttagttaggattagaatgaggaagaagaaaatagttttaatttggggttttatttttttttttttatttttttgaagtatttttaagagtttttagtaatttattagtattttattttttttagaggtagaagattatcgtttagtgttttttattgttttattttgtacgtttgttataagaattgaatttaaaggagttggtgtgtttttttatattagtttttattagtagtgtgaatgatttaggaagaagatgttttgattgtaaaatatgggagataataaggattgattttggtttttttattgttaggtgttttggagtttggtaagtgtttcgagaggagggtttttttttttttgttttattatatttagtttgttgaaatattaaggtattttggggtttgggtttttttgaattgttttgtgttaggaatgtttataggttgggattgaagggtgtttttagtttttgattttttttttttttttaagacggagtttttttttgtcgtttatgttggagtgtattggcgtaatttcggtttattgtttttcgggttcgagtaatttttttgttttagttttttaagtagttgggattacgggtgtttgttattatatttgattaatttttgtaattttagtagcgataggttttattatgttggttaggttggttttaaatttttgattttaagtgatttgttcgttttagttttttaaagtgttgagattatatgcgtgagttatcgtgttcggttttgtttttgatttttataggatatttaatttgttagtgttgtaaatagtattaaaaattttgttatttggagttattgttatgtttaaggatttttttggttttgtaagtttgttttttttgtatatgtatttaatagaaaaggatttaaggttttttaagggggtatggttattatttgtttgatttttagttttgttttttttttgtttttttttttaaagttggtggaggtaggattgttatagaatatgttggtagtttgggggaaaaatttgaatttttttttttttttttttgagatagagtttcgttgtgttatttaggttggagtgtagtggcgcgatttttgtttattgtaattttcgttttttgggtttacgttatttttttgttttagtttttttagtagttgggattataggcgttcgttattatgtttagttaattttttgtgtttttagtagagatggggttttatcgtgttagttaggatggttttgattttttgattttatgattcgtttattttagttttttaaagtgttgggattataggcgtgagttgtagtgtttggttaaaatttgaattttttataatagattttatggttatttaataagaagtaaatgtacgttttttgaatgaattaatgttttttagtaattgtttgttttatttttaagttttgattaatttagttttttattttttcgattaaagt

SEQ ID NO: 51 - DNA, 5989 bp, Artificial Sequence
  chemically treated genomic DNA (Homo sapiens)
ttttaggtataaataatttttttgttttagttttttgagtagttggtattataggtgtttgttattatgtttagttaatttttttgtattttagtagagatgggttttattatgttggttaggttggttttaaatttttgattttaggtgatttgtttattatagttttttaaagtgttgggattataggcgtgagttattgtatttcgtttatgataaagttttattaatatttttagggtggtaagggagttatggaaagttaagtatattgtaattttgaaaaaaaaaaaatggggttttgttagaaaggaagaaagggaggataaatgttggataagacggttgggcgtggtggtttatatttgtaattttagtattttgggaggttaaggtgggtggattatgaggttaagagtttaagattagtttggttaagttggtgaaatttcgtttttattaaaaatataaaaattaggttatgtatggtggtttatgtttgtaattttagtattttgggagggtaaggtgggtagattataaggttaagagttcgagattagtttggttaatatggtgaaattttatttttattaaaaatgtaaaaattagttgggtgtggtggcgggtgtttgtaatcgtagttatttgggaggatgaggtagagaattgtttgaatttaggaggcggagtttgtggtgagtcgagatcgcgttattgttttttagtttgggcgatagagtgagatttcgttttaaaaaattaaaaaataaatattggttaagacgagtagtaatgtttgttatattttttgagagattattgaattttagttatatgttagtgttatttggggagatttgggtttgaatttttttttttttttgggggattttttggttaaaaatgtatttgaaattgggtgtggtggtttatgtttataattttagttatttaagaggtttaggtgggaggattttttgaggataggagttgtagattattttggataatatagtaagattttgttattttttttttttttttttttttgagatagagtttcgttttgttgtttaggttggagtgtagtggtacgaatttcggtttattgaaagttttgtttttcggatttatgttatttttttgttttagttttttgagtagttgggattataggtattcgttattatgtttagttaatttttcgtattttttttttagtagagacggggttttatcgtgttggttaggatggttttgattttttgatttcgtgatttgttcgttttagttttttaaagtgttgggattataggcgtgatatcgtgttcgattaagatttgttttttaataaatagggttagttgtaatggtttatgtttataattttagtattttgggaggttaaggagggtagatggtttgaggttaggagttcgagattggtttggataatatggtgaaattttatttttataaaaaaatataaaaattagttaggtatggtggtgttggtttgttgttttagttatttgggaagttgaggtaggagtattattttagtttaggaggttaaggttgtagtgagtcgagattgtattattgtattttagtttgagtaatatggtgatattcgttttaaaaaataataataataaataatgaataaatgtaatttattttaaagtgaaatttgtatttttttttttagtttttgtataaggaaaaattattgttttttttatttttttaatttttttttattttattatttgataaaattttattttataaagtatgagagtaaagttattttttttataatatttttttttagtttttttagtttaaagtgaattttttaattttttaattttaaaatgaagttgttaatgttttgtgtagagtatatattttattttatattatggttagttgttgtataagattagatattttttaaatagagaaattattttttatttattataattataaaatgttttatttttgttatttatattataaatttttatggttttaggttttgtttaaaatataaatgggtggtatggacgtcgtattattttattaaattgtgatattttggggattaggaatttttggttaagagggagatttacgtttataattttaatattttatttatttatttatttttgagatggcgtttcgtttttgttgtttaggttggagtgtaatggcgtatttttagtttatcgtaattttcgttttttaggtttaagcgattttttcgttttagttttttaagtagttgggattataggtacgtgttattacggttcggttaattttgtatttttagtagagatggagtttttttatgttggttgggttggttttaaatttttgattttagatgattcgttcgttttggttttttaaagtgttgggattgtaggtgtgagttattgcgttaggttttattattattattattttttttgagattaagttttgttttgttgtttaggttggagtgtagtggtattattttggtttatcgtaattttcgttttttgggtttaagtagtttttttgttttagtttttagagtagttggtattatagatgcgtattattatatttatttaatttttgtgtttttagtagagatagggtttcgttatgttttttaggttggttttaaatttttgggtttaagcgatttatttattttagttttttaaagtgttgggattattggtatgaggtatagagttcggtttgtaattttaatattttgggaggttaaggtaggaggattatttgagtttaggagtttaagatcggtttgggtaaaatagtgatattttatttttataagaaataaaaaaattagttaagtataggggtatgtatttgtgtttttcgttattcgcgaggttgtggtgggaggattattttagtttaggaggttgaggtagtaatgagtattgatggtgttattgtattttagtttgggtgatagggtaagattttattttaaaaaaataaataaaaagtgagtttgtttattttttttatgttttttagtattttgtttttgaattttagttattatttttatagattttttaataaaaaggttgttttaattaacgttaattaatatatatggtatataagaagatttttgtttttaagggttttataaatttttagagttaaatgtgttttattattagtataaaaataaatggtgttagttgggtgtagtgatttatatttgtaattttagtattttaagaggttgaggtaggtggattatttgaggttaggagtttgagattagtttggttaatatggtgaaattatattgttaggtttttgagtttaagttaagttatcgtattttttgtgatttgtacgtatatatttagatggtttgaagtaattgaagatttataaaagaagtaaaaatagttttaattgatgatattttattattgtgatttgtttttgttttattcgaattgattaatgtattttgtaattttttttatttttaagaaggttttttgtaattttttttatttttgagaatgtattttgtgagatttatttttgtttataaaatattgtttttaattttattatttattttaaaatttgtaagaattaatgataatttattattttttgttgatttttttttcggatttagttcgtttgtatttaggtgaaataaatagttatgttgtttatataaagtttgtttggtggtgtttttatatagacgcgtatgaaatatatttttattaaaaatataataattagttgggcgaggtggtttatagttgtaattttagtattttgggaggtcgagataggtaggttatttgaggttatgagttcgagattagtttggttaatatcgtgaaaattttatttttattaaaaatataaaaattagttagatgtggtggcgtacgtttgtaattttagttattcgggaggttgaggtatcgaatcgtttgaacgtgggaagtggagtttgtagtgagtcgagatcgttttattgtattttagtttgggtaatagagttagattgttttaaaataaataaaaaatggtgttaagatttttagacgagattttaatggattaaggtttatatgtaaatagtattaaagattatggaatagagatgggagaagtaagtagggaggtaggaatagtttagttgtggtagttttagtttagtttatttatataaatggttttttagggtagtacgtggagtatttttatttttaaatattggattgagagtagagagttgtgtaaaataattataagtttttaattatgtttttttaattatttttattatttaagattgttgtttttatttattattgaattttttcgttttttttttttaatttttgtgttagttaatggttgaaattttgatttggtaaaaaatttttggcgaaaattagtaaaaagggtttataaattaggttttagggaagtatagaggtagttacgagaaggttcgaggtgtttatggaaagagttcgagtttaggagttttgggaggattttaggcgttcggagtcgtcgttacgtaatcggtatttagagttttcgaagatcggaaggtttcgtttaggtttcggtttaggtttcggtttcggtttcggtttcggtttcgtttcggttcggtcgggtagttggtaggtgtcgtgcgtaatttttcggaagttgtcgtttttttttttttttatgggaatattttttttaaaaaaaaagagttcgttggcgttatttcgtaggattggtcgttttaaaatcgtgataaaggagttgttcgttattttttattttcgtttttttttagtaaggagtcggggttttttttagtttttttagttaggcggcggcggcgattggtaatgtttggttttaaaagaaacgcggtaatcggatttaatttttattgtgggggggtcggtttgggggtcggtagcggcggcgttattcgttcgggagggcgatttttggttacggagaaggaggtttcggttcggcgagagatagggggaggggaggtcggcgcggtgattggcggaagcgtcggcgtaagtttttcgtttatttttacgttagattttcggagggtcgcgcggtcgtcgtttattggcgtcgaggttttcgacgttatcgcgattttcgcgaggttgttttttttcgcgtttattcgtcgcgcggcgtcgtttgaggagatggaagtttcggtcgttgacgttattatgtcgttcgaagaggagttggacgggtacgagtcggagtttttcgggaagcggtcggttgttttgtcgttgttggagttggtcggggaatttggtaataatattagtacggacgggttattattttcgacgtcgtcgttagtagaggaggaggaggacgagttgtatcggtagtcgttggagattatttttcggtattttcgggagtaggttatcggcgttaaggatataaagttaatgggtaggtttggggttattagtaggaaggcgttggagattttacgacgggttggggatggcgtgtagcgtaattacgagacggttttttaaggtaagggggtttattaatcgttaaggttttatttttttttttttattttttttcggatttattcgttaagggtgggttggaaatcgaaacgagttagtgttgaaacgtgttttattttatttttgaagttagaatattttggttatgagttattgttttcgtttattttgatttttttggaaatggtagtttttgtttaaagatcggaaagggtgggatgttaattttaagtggggttaatttgagttttgtaaattttagtagcgattttttcgtcgcgggtgggtaggcgaattttgcgtcggtttagataaaggaggtcgtgaggatttgtatgttttttttttttagg

SEQ ID NO: 52 - DNA, 5989 bp, Artificial Sequence
  chemically treated genomic DNA (Homo sapiens)
tttgagaaagaaaagtatgtaggtttttacggttttttttgtttaaatcggcgtaagattcgtttgtttattcgcggcgggaaaatcgttattgggatttatagaatttaggttgattttatttgaaattgatattttatttttttcggtttttgaataagagttgttatttttaaaagaattaagatgggcggaaataatgatttatggttagaatattttggttttaggaataggatgagatacgttttaatattgattcgtttcggtttttaatttatttttggcgggtgagttcggggagagatggaaaaaagggagtgaggttttggcgattaatgaatttttttattttggaaggtcgtttcgtggttgcgttgtacgttatttttaattcgtcgtaaggtttttagcgtttttttgttggtggttttagatttgtttattggttttgtgtttttggcgtcggtggtttgttttcgaaggtatcgagagataatttttagcgattgtcggtataattcgtttttttttttttttgttggcggcggcgtcgagggtagtgattcgttcgtattggtgttattattagatttttcgattaattttagtagcggtaggatagtcggtcgtttttcgagaggtttcggttcgtattcgtttagttttttttcgggcgatatgatggcgttagcggtcggggtttttatttttttaagcggcgtcgcgcggcgggtgggcgcgaagaaaagtagtttcgcgggggtcgcggtgacgtcggggatttcggcgttaatgggcggcggtcgcgcgatttttcgggagtttggcgtgagggtggacggggggtttgcgtcggcgttttcgttaattatcgcgtcggttttttttttttttatttttcgtcgggtcgaggttttttttttcgtagttaaaagtcgttttttcgggcgggtggcgtcgtcgttgtcggtttttaagtcggtttttttatagtagaggttgagttcgattatcgcgttttttttgaggttaaatattgttagtcgtcgtcgtcgtttggttgagaaaattggggaagatttcgattttttattggaaggaagcggaagtgagaagtggcgagtagtttttttattacggttttagggcggttagttttacggggtggcgttagcgaattttttttttttaaaaaaagtatttttataaaaggggaaaggggcggtagttttcggagggttgcgtacggtatttattagttgttcggtcgggtcggggcggggtcggggtcggggtcggggtcggggtttgagtcggggtttgagcggggtttttcggttttcggaggttttgagtgtcggttacgtaacggcggtttcgagcgtttggggtttttttagagtttttgggttcgagttttttttatgagtatttcgggttttttcgtggttatttttgtgtttttttgagatttgatttgtgagttttttttgttggttttcgttagaggttttttattaaattaaaattttaattattgattaatataggggttgaaggaagaggacggggaagtttagtgatggatgggaataatagttttagatgatagggataattaagagggtatagttggggatttgtggttattttgtatagttttttatttttagtttaatgtttggaaatgaggatgttttacgtgttattttaaagaattatttatgtaagtggattaagttaaaattgttatagttaaattatttttgtttttttgtttgttttttttatttttgttttatagtttttggtgttatttatatataggttttaatttattagaatttcgtttgagagttttgatattattttttgtttgttttgagatagtttagttttgttgtttaggttggagtgtagtggggcgatttcggtttattataagttttattttttacgtttagacgattcggtattttagtttttcgagtagttgggattataggcgtgcgttattatatttggttagtttttgtatttttggtagagatggggtttttacgatgttggttaggttggtttcgaatttatggttttaagtgatttgtttgtttcggttttttaaagtgttgagattatagttgtgagttatttcgtttagttgattattgtatttttagtagagatgtgttttatgcgcgtttgtgtgaagatattattaaataggttttgtgtgagtaatatggttgtttattttatttgggtgtaggcgggttgagttcgaaaagagagttagtaaagggtgatggattattattagtttttataggttttgggataggtggtgaagttgagagtaatgttttgtgggtaggggtggattttataaagtatatttttaagggtggggagaattataaagaatttttttaagggtgggggagattataaagtatattgattagttcgggtggggtagaaataaattataatggtggaatgttattagttaaggttatttttattttttttgtggatttttagttattttaggttatttggatgtatacgtgtaagttataggggatgcgatggtttggtttgggtttagaggtttgataatgtggttttattatgttggttaggttggttttaaatttttggttttaggtgatttatttgttttagttttttaaagtgttgggattataggtgtgagttattgtatttagttgatattatttatttttgtattgataataaggtatatttgattttagaggtttgtaaagtttttgagaataaggatttttttatatgttatgtatgttagttaacgttaattaaagtagtttttttgttaaaagatttgtaaaaataatagttaaaatttaaaagtaaggtgttgagagatataggaaaggtgagtaagtttattttttatttatttttttgagatgaggttttgttttgttatttaggttggagtgtagtggtattattagtgtttattgttgttttaattttttgggttgaagtgatttttttattatagtttcgcgagtagcgaggaatataggtgtatgtttttatatttggttaatttttttattttttgtagagatggggtattattattttgtttaggtcggttttgaatttttggatttaggtgatttttttattttggttttttaaagtgttgggattatagatcgggttttgtgttttatgttaataattttagtattttgggaggttgaggtgggtggatcgtttgagtttaggagtttgagattagtttgggaaatatggcgaaattttgtttttattaaaaatataaaaattagatgggtgtggtggtgcgtatttgtaatattagttattttggaggttgagataggagaattgtttgaatttaagagacggaggttgcggtgagttaagatagtgttattgtattttagtttgggtaatagagtaagatttggttttaaaaaaaataataataataatgaggtttggcgtagtggtttatatttgtaattttagtattttgggaggttaaggcgggcgaattatttgaggttaggagtttgagattagtttaattaatatggagaaattttatttttattaaaaatataaaattagtcgggtcgtggtggtacgtgtttgtaattttagttatttggaaggttgaggcgggagaatcgtttgaatttgggaggcggaggttgcggtgagttgagagtgcgttattgtattttagtttggataataagagcgaaacgttattttaaaaataaataaataaataaagtgttggaattataggcgtgagttttttttttggttaaaagtttttaatttttaaaatgttatagtttagtaaggtgatacggcgtttatattatttatttatgttttgggtaggatttagaattataggggtttatagtatgagtggtaaggatagagtattttgtggttatagtgaataagaaatagtttttttatttaaggaatgtttaattttgtatagtaattaattataatgtgagatggaatgtatgttttatataaggtattaataattttattttggagttaagaggttgggaaatttattttgggttgagagagttagaggaaagtgttatggaggaggtagttttgtttttatgttttataaagtaaaattttattaggtggtaaagtggaaagagattgaggaaataggaggagtaatgatttttttttgtatagaggttaaaaaaggaaatgtaagttttattttaaaataaattgtatttatttattatttgttattattattttttgagacgggtattattatgttgtttaggttggagtgtagtggtgtagtttcggtttattgtaattttgattttttgagttaaagtgatatttttattttagttttttaagtagttgggataataggttagtattattatgtttggttaatttttgtgtttttttgtagagatggggttttattatgttgtttaggttaatttcgaatttttggttttaagttatttgttttttttggttttttaaagtgttaggattataggtatgagttattgtaattggttttgtttgttaggaaataagttttggtcgggtacggtgttacgtttgtaattttagtattttgggaggttgaggcgggtagattacgaggttaggagattaagattattttggttaatacggtgaaatttcgtttttattaaaaaaaaaatacgaaaaattagttgggtatggtggcgggtgtttatagttttagttatttaggaggttgaggtaggagaatggtatgaattcgggaggtagagtttttagtgagtcgagattcgtgttattgtattttagtttgggtaatagaacgagattttgttttaaaaaaaaaaaaagaaagaaagtaataaagttttgttatgttatttaggatggtttataatttttgtttttaagggatttttttatttgagttttttgaatagttgggattataagtatgagttattatatttagttttaaatatatttttgattagaggattttttaagaaaaaaaaaaaatttaggtttaagtttttttaggtaatattagtatataattagagtttagtagttttttaggaggtgtgatagatattgttattcgttttagttagtatttattttttaattttttgagacggagttttattttgtcgtttaggttggagggtagtggcgcgatttcggtttattataaatttcgttttttggatttaagtaattttttgttttatttttttaagtagttgcgattataggtattcgttattatatttagttaatttttgtatttttagtagagatggggttttattatgttggttaggttggtttcgaatttttgattttgtgatttgtttattttgtttttttaaagtgttgggattataggtatgagttattatgtatggtttaatttttgtatttttagtagagacggggttttattagtttggttaggttggttttgaatttttaattttatgatttatttattttggttttttaaagtgttgagattataggtgtgagttattacgtttagtcgttttatttaatatttattttttttttttttttttttgatagaattttatttttttttttttagaattataatgtgtttagttttttatgatttttttgttattttgaaaatgttaataaaattttgttatgggcgggatgtagtggtttacgtttgtaattttagtattttaggaggttgtggtgggtagattatttgaggttaggagtttgagattaatttggttaatatggtgaaatttatttttattaaaatataaaaaaattagttgggtatagtggtaggtatttgtaatgttagttatttaggaggttgaggtaggagaattgtttgtatttggga

SEQ ID NO: 53 - DNA, 9881 bp, Artificial Sequence
  chemically treated genomic DNA (Homo sapiens)
tatttggtaaggtagattttatagtaattttgaatatgattttttttagtttttagttatgtattattaagtgttttttgggtagaggtagagttaagtattgagtgttagttttgacgttcgtatgttttagttttttttatatataaaaagtagtatatatatttatttttttttattttattatttgttgtagggattaaattcgggagagtaattttgaagtttataaatttttttgaagagatttaagaatttattatgtttttggtgtattaagttttggggtatatatttagaatattttatgttttggaagttgagtattagtttttttttattgtttgtttggtagagtttgtttgattattgtaggtttttttatttatgtttttagtttaggtattttttttttgatatgaggtttttgattagaaaagagttttttttttaggtgttttgagagaagtttgtaaatttggatagtatattttattttgataaaattattttgttgtggttttgatgtataaaaaaaaattttttttttgagatagagttttattttgttatttaggttggaatgtagtggcgtaattttggtttattgtaattttcgttttttgggtttaagcgatttttttgttttaattttttaagtagttgggattataggcgtgtattattatatttggttaattttgtatttttagtagagatagggttttattatgttggttaggttggttttgaatttttgattttaggcgatttgttcgttttggttttttaattatatatagtttgatgttatttataaaaattttaaaagtataaatagatttttaaggaatatatatatatataaattttaaaagtttaaagaaatgtatggtaggggtatatattaaatttaagatagtggtttttagaggatgaagaaaggagatattatagaggtgattatagggaatttttttgtatgtgtattgtttttaggaagaggaatgggaaaagggatattatattttttttttttttttttttgagatagagttttattatgttttttagggtggagtgtaatggcgttattttagtttattgtaattttcgtttttagggttggagcgatttttttgttttagtttttcgagtagttgggattataggtatgtattattatattcggttaattgttttgtatttttagtagagatggggttttgttatgttgggtaggttggttttgaattttcgattttaggtgattcgttcgttttagtattttaaagtgttgggattataggtttgagttattgcgtttagttgggagattatattttttatattttttgatatgtataaagttattaattatattttttttttagaaaggttatagattaataatattgatttttaatttttttaaaattagaagggttataagaaatggttgaatttagttattttgttttatagattagggaattgaagatcggaaatttgtgtaattttttttgttttttataaatagttagattagaatttagattttttgtttttttattcgaattaatggtttgtgagtatagtttttaaagaaggaagtggtgattatttagttgagtttttaagttaatttttaattttattttttttttttatttttttttttttttttttttgagatggagtttttttttgtcgtttacgttggagcgtagtggtacgcgtttgtaattttagtaatttgggagggtgaggtaggagaatcgtttgaatttgggaggcggagaatgtagcgagttgagatcgtgttattgtattttagtttggtaatagaagggaatttcgttttaaaaataaaataaaataaaataaaataaaataattatatatatagaattagttgggcgtgttggcgggtgttatttgtaggattataagattatatttgtaattttaatattttgggaggttaaggtgtgggggaggattatttgaggttaggagtttaagattagattgggcgatatagtaagattttgtgtttatttttttaaaaaaattagaagatgagtaattatttataaattagtgttaattacgatgggaaaaattttattttttattatggtttcgttaatatatttattaacgttttgttttttttgattgattgagatagagtttggttttattatttaggttagagtgtagtggagtaatttcgatttattgtaattttttttttcgggtttaagtaattttttttttttagtttttcgagtagttgggattataggcgtttattattgtattcggttaattttttttgtatttttagatagtgttttattatgttggttaggttagtttcgaatttttgattttacgtgatttatttgtttcgattttttataagtatgagaatgataatagtattgtttgtaacggtaaacgattgaataatgtttaagtatttattaaaggaggagatgaataaaaattgtggtgtattcgttattattatgggttgaatgtgttttttttaaatattatgttgaatattatttttagtattttagaatgggaatgtatttggagatagggtttttaaagaggtgattaaggtaaaatgaggttatatggatgggtttaatatgattagtgtttttataagaagaggggattaggatatagataatatatagataatgggtaattatataaggatatagtgaaaagataggttgtattttagtttggtaatagaggggaattttattttaaaaataaaataaaataaaataaagtaaaataattataaataaaaaattagttgggtaatttggtgggtgttatttgtaggattataagattatatttataattttaatattttgggaggttaagtggggaggattatttgaggttaggagtttaagattagattgggtaatatagtaagattttgtgtttatttttttaaaaaaattagaagatgagtaattatttataaattagtgttaattatgataggaaaaattttattttttattatggtttagttaatatatttattaagttaaggaaagagggtattaggagaaatttaatttgttaataatttgatttttaatttttagtttttagaattatgagaaaataaatttttgtttaagttatttagtggtattttgttatggtaattttagaaaattaatataattattatataataatttattatatatttatataatttagtatgttattgtagaataacgttaaaatattaaaaatgaattaattagggttaggtgcggtggtttatatttgttatgttagtattttgggaggttgaggcgggtggattacgaggttaagagtttgagattagtttggttaatatggtgaaattttgtttttattaagaatataaaatatagtttggcgtggtggcgcgtgtttgtaattttatttatttcggaggttgaggtaggagaattgtttgaatttaatattatattatttagttatttgaagatagtttttaatttttatgtttaattttttttttttttttttttttttttttttttgagatgtagtttcgtttttgtcgtttaggttggagtgtaatggcgttatttcggtttattgtaattttcgttattcgggtttaaacgatttttttgtttcggttttttaagtagttgggattataggtgatcgttattatgtttcgttaattttttgtatttttagtaaaaacgggggtttcgttatgttgggtaggatggtttcgaattgttgattttaggtgattcgttcgtttcggttttttaaagtgcgttgggattataggggagagttattgcgttcggtttttttcgtttatatgtaggttaaaaatttttttgagtttttaattattttttttttttttttttttttttttttgaggagtttcgtttttgttgtttaggttggaatggcgttatttcggtttattgtaattttcgttttttaagtttaaacgatttttttgagtagttgggattataggtatgcgttattatattcgattaattttgtatttttagtagaaatagggttttattatattggttagattggtttcgaatttttgattttaggtgattcgtttgttttaggttttttaaagtgttgggattataggcgtgagttatagcggttggtgtttttaattatttatttgatatggttttaagtttttttgttattttagtgtcgttatcgtttcgttttttttttttattatttttggggagtaagggtgaggattggggaatggtagaggaagcgtagttttttcgaagagttgaaggtagtttgtgattatgattttagtttttttttttttttgttttttgattttttaatatacgtttgtaaatattataagattttgtaagttttttatttattatttttttaaatttgacgatttttaatcgttcgggttttacgatttttttttcggattaggatttattttatggtagtgagtttagtttttttagttttttagtttttttattgttttatttatggttttcggaggttttatcggaagttttcgtgtgaggtcgtgtgggaggtcggaagttgcggttttattattcgttattttaaaatgttgtcgaggttttaggatttgtgattgttatttttttttttattcgggttcggcgggggagcgatttatggagttgtcgtaaggtgtggtttttggttttcgtcggcggggtgtcgggagcgggagttggagagtgaggagtaggcggtcgtatcgttagttgtgcgggtagcgggcgggaggagtttgagaggtgggtcgggcggcgtggggaaggtcgcgttaggcggaagaagggttcggggggaggggaagagttgtgggatgagggttcgcggaagataaaagtggaggtggggtgacgtgaagtaattttggttaataggtgataaatttaaagtcgacgtagttggattgagtttaattggatataatatttgaggattgttgaggtaatttggagaaaggaggtgggagagagggaatcgggtagaatgatattgacgtgttttaagtttttaagttagtttttaggtttgcggatagtttattttagaggtatttgagtgtttgtttgaaaatgtttgttttggtttggcgcggtggtttacgtttgtaattttagtattttaggaggtcgaggtgggtggatttatttgaggataggagttcgagattaatttggttaatttggtgaaatttcgtttttagtaaaaatataaaaatattagatgtgtgtggtggcgtatgtttgtaattttagttattcgggaggttgaggtaggagaattatttgaattcgtgggcgggggttgtagtgagtcgagatcgcgttattgtattttagtttgggttatagagggagatttcgttttaaaaaaaaaaaaagaaaaaatgttcgttttggggttatattgaaatttatagatagtatcgagatggggtttagagaaatatattttaatgagtatattttttagtgatttttgtatattttaaagtttgaaaattataggtttttttggtattgtttttggtttaaatattttttttatatatattgagtagtggtataaaatgtattgttaatatatagaaaatatgaaattttttaaatattttcgattagagaattataagagtagtaaatgtggttttattaagtgggaagaaagtagtaatttaaaataattttttgggagattgaattgagtaataataaaattttagtttttcgttaataataataataataataataataataataatttattgaatgtggttagtttattagatgaggaaagaggaaggtattttttgtatttttgtttagttttttttataagtattattaagttaatagttttgtttttttggtgtttgtattatgtaatgtttttaatattttttaattgtgtttttttatgtattaaatgtttttttttttgttattgtgtgttgttattatttttgaaataggtaattttgtgtgtatatagttaaattttattgttattggattttttggtttgatagattaaagatataatagaaaattatttttgttatttttttggggaaattaatggatttaaaattagtagtattggatatttttttttagttattttttagagtaattgttatattttatttttagggttttaattttgaagaaatttattaaattttatagagtattttttaatattgagttcgttgtggttttgaattggggttagtacgagaggtattgagggtttgttatattatatgtattaattagttggtatgtttagtatttgttagggtttttaatggcggtttttaaattttggggattatagttttttttgaaaagttaatgaattttatgaaatttttttttataagtagtataatattaaatattaattttagggttttattgaaattattgatttatgatttttaggttttgttttttggtaggatgttaaagaagagtgaatggtttataaagagtttggtagtatatacgttttttaaaaggttatgtatttatagttaaagttattaaggtgagtgaaatatttggttagttgttttgagtttgggtaggggtaggattattatatagttggtgtagattgttgtgaattgtataatttttggggtattgtttataggttgttatataaatgattttttagagatgtgtaatatatatttgaggaggttttgggggtggggtggggtgataatggatatattatcgtaatttttttttttgatatagggttttgttttgttatttaggttgaagtgtagtggcgagaggtttacggtagttttgattttttggttgaagcgatttagttattttagtttttcgagtagttgagattataggtatgtatattacgtttggttgaattttttgtgtttttgaagagatggcgttttgttatgttgtttaggttggttttgaatttttgggtttaagtaattatttattttagttttttaaagtgttgggtttataggtaggagttattatattgggtatttagggtaatattttttaaatgaaaataaaataaggagtattagaaataaaaatggggttagtttttttgtttatttaagttttttatattttgtatgtgatttgtataaggtattttaatgtaattttaatggtataacgtgttttttggggttttttattttgtttattttgagtttttggtgttgtagatgtattatttttgttgaatgtatttttgatattagaagaagaaggtaagttgaaattggtaattaagtttatagagtattgtagttttttttggaaatagggtttcgttttgtttttttaggttggagtgtagtgatgtaattataatttattatagttttagtttttaaggtttaagtgatcgttttttttagttttttgagtagttgggattataagtttatgttattatatttggttaatttaaaatattttttttgtgaggaggtgtggttttattgtgttgtttatgtttgtttagaatttttgggtttaagcgatttttttagtttagttttttaaaatgttgtttttgtttggtataattgttagtaggtaaattttatattattgtttgttttgagggtttgggggttttttgtttgtttttggtggagttatataagtttattatataaaggtatgaaaagagttattgttattaggaaaaatttaagttattataggtttgggtatatagggttaattttgtgatgtatatttttagttttgaatttataggggtatagttttggattattgtaatttttattttgttagtttaggtgatttttatgttttagtttttttagtagttgggattgtaggttcgtgttatgtttagttagttgttgtatttttagtagagatagggttttgttttgttgtttagtttggtttttgttaaaaataaattttcgaagttgtaaatgaatattatttaaatataaatttaatttttttagtaaggtaattttatttttatggaagggtgtattttacggatggagtaatggtgagagtatatttgaataagggaggggaaggggtttttatttttgacgtaggtagtttttatttttgtgttgttttcgtattggttagggttggatcgtatagtttaagttaatattgatgggttattttaaagagagtaggggtatgagttggagtggttgggcgagtagtatggcgggaagaatagttatagaataggtgatttaggatgatttaggttaagggaggtgattaggagtgatttaggatggagtaggtgatagaagttaggagggggttgtttattgaaacgaggggtaaggagatgaagagaatgaggaagttaaatttttaaagttttaaatgaagaataaagaataggggagttgaatatatagatatattggttttttggagagtattttagaatttattgtatttaataatttataggttaaaatttttgaagaggaatttattaaattttatattttaaatttttgattttaggtgatttgtttattttagttttttaaattgttaggattataggcgtgagttattgtatttggtttattttagtcgttatttattttttttttgatgtggtttgttagttattagttttaataattgttgttttttgttagaaaaaggtataaatgaaggttaatttaagtttatttaaaaatttatttttcggttgggtatggtggtttacgtttgtaattttagtattttgggaggttgaggtgggcggattacgaggttaggaatttgagattagtttgattaatagggtgaaatttcgtttttattaaaaatataataatgagttgggcgtggtggcgtgtgtttgtaattttagttatttaggaggttgaggtaggagaatcgtttgaatttgggaagtagaggttatagtgagtcgagattgcgttattgcgttttagtttgggggatagcgagattgtgttttaaaataaataaataaataaataatttattttttttttttgtagtttttgtttttttaaggataaaaggtaggtgaaagatttttattgaattttattttgtattttattttatgttatattttttttttgatggtatatgtttatttcggtttaatttattttgtaggtttgtaattgttgtgtttttttttggggttggtatatttataagttgttttaattggtatttaaaatgttgatttttagttaattttttatggttttttgttaagatatgttttaatatgttgtagaggtttttttagaagttttgttggaattttaaaatttgtgatttattttggtaaatttttagttttgtatttagagagtgttttatttgataattattggggagataatgatttgatttttagttaaaatagtttattgattaatattagttggaggttggagcgtgtttgaaattgttattgttttagtttttatttgagagaagtttggacgatttttatttttaattaaattagaattagaaagtagttagaagatatgtagaattttagtaagggtatatagtatttgtgtacggtgttttattatatgtgttatatgtgttttttatttttgttggttgtttttgtgtgaatgttaaatagggaattttttgtattagaatagatgttataaatttttttttttatttagt

SEQ ID NO: 54 - DNA, 9881 bp, Artificial Sequence
  chemically treated genomic DNA (Homo sapiens)
attaaatagaaaaaaaaatttataatatttattttaatgtagaaaattttttatttagtatttatataaaggtaattagtagaagtaaaagatatatatgatatatataatggagtatcgtatataaatgttgtatatttttgttgaggttttgtatattttttgattattttttagttttgatttaattaagagtaagaatcgtttaagttttttttaggtgaaggttgaaatagtaatagttttaggtacgttttaatttttaattgatgttaattagtaaattgttttagttgaaagttaaattattatttttttaatggttattaggtagagtattttttagatgtaagattggggatttattaaggtaagttataggttttaagattttaataggatttttaggaaaatttttataatatgttggaatatgttttgataaaggattatagaaagttaattaagagttaatattttaagtattagttaaaatagtttgtaaatgtattaattttagaaaaaaatatagtaattataaatttataaaatgggttaaatcgagatggatatatattattaaagaaaagatgtagtatgaagtgaaatatagagtaaagtttaatgaaaattttttatttattttttatttttaaaaaaataaaagttatagagaaggaagatagattgtttatttatttatttattttgagatatagtttcgttgttttttaggttgaagcgtaatggcgtaatttcggtttattgtaatttttgttttttaggtttaagcgatttttttgttttagttttttgagtagttgggattataggtatacgttattacgtttagtttattattgtatttttagtagagacggggttttattttgttggttaggttggttttaaatttttgatttcgtgattcgtttattttagttttttaaagtgttgggattataggcgtgagttattatgtttagtcggaaaatagatttttaaataaatttaagttaatttttatttatgtttttttttaataaaaggtaataattattaaaattgatgattaataagttatattagggaaagggtaaatggcgattagaataggttaggtgtagtggtttacgtttgtaattttaatagtttgggagattaagatgggtagattatttgaggttaggagtttgagatgtaggatttaataaatttttttttaaaggttttagtttgtaaattgttaagtataatgagttttgagatgttttttaaaaaattaatgtatttgtatgtttagtttttttgttttttgttttttatttaaaattttaaaagtttaatttttttattttttttatttttttgtttttcgttttagtaaataatttttttttagtttttattatttgttttattttgagttatttttggttattttttttgatttgagttattttgagttatttgttttgtaattgtttttttcgttatattattcgtttagttattttagtttatatttttgttttttttaaaatagtttattagtattagtttagattgtgcggtttaattttagttaatacgggaataatatagaagtaggggttatttgcgttagggataagaattttttttttttttttgtttaggtgtgtttttattattgttttattcgtgagatgtatttttttatagaagtaaaattgttttgttgagaaaattaaatttatgtttgagtgatatttatttgtagtttcgaaaatttatttttaatagaggttagattaggtaatagggtaaaattttgtttttattaaaaatataataattagttgggtatggtacgagtttgtagttttaattattaaggaagttgaggtatgagaattatttgaattggtaaggtggaggttgtagtgatttaagattgtgtttttataaatttagggttggggatgtatattataaggttaattttgtatgtttaaatttataatgatttgaattttttttaatagtaataattttttttatatttttatatgatggatttgtgtaattttattaaaaataaataaaaaatttttaaatttttaaaataaatagtgatgtgaaatttatttattaataattgtgttaggtaaaagtaatattttgggaggttgagttaggaggatcgtttgagtttaggagttttagataaatatgagtaatatagtaagattatatttttttataaaaaaaatattttaaattagttaggtgtagtggtatgagtttgtggttttaattatttaggaggttgaggaggacgattatttgagttttaaaggttgaggttgtggtgagttgtgattgtattattgtattttagtttggggggataaagcgagattttatttttaaaaaaaattgtaatattttgtaagtttagttattagttttagtttgttttttttttttagtattaagaatatatttaataaaaatgatatatttatagtattaggaatttaaggtgagtaggatggaaaattttaggaaatacgttatgttattgaaattgtattagagtattttatataggttatatataaaatgtgaaaggtttaagtagataaagaagttggttttatttttgtttttaatgttttttgttttgtttttatttaaaaagtgttattttgggtgtttagtatggtggtttttgtttgtaaatttagtattttgggaggttgaggtgggtgattatttgggtttaggagtttaagattagtttgggtaatatggtaaaacgttatttttttaaaaatataaaaaatttagttagacgtggtgtatatgtttgtggttttagttattcggggggttgagatggttggatcgttttagttaggaggttaaggttgtcgtgaatttttcgttattgtattttagtttgggtgatagaataagattttgtattaaaaaaaaaagttacgatggtatgtttattattattttattttatttttaaggtttttttagatatatattatatatttttaaaggattatttatatggtagtttatgaatagtgttttaagagttatatagtttatagtaatttgtattaattatatggtaattttgtttttatttaagtttaggataattagttagatgttttatttattttaatggttttagttgtaagtgtatgattttttgaaaagcgtatgtgttattaggttttttgtgggttatttatttttttttggtattttgttaaagaatagaatttgagggttatggattagtggttttaatgaagttttgaaattgatgtttaatattgtgttatttataagaagaggttttatgaggtttattagttttttaaggaggattataatttttaaagtttaagaatcgttattagagattttagtagatgttaggtatattaattgattaatgtatatggtgtgataaatttttagtatttttcgtattagttttaatttaaaattataacgagtttaatgttagaaaatattttgtaaaatttgatggatttttttaggattgggattttgaaaataaaatatagtaattgttttaaaaggtaattgggggaaaatatttaatgttgttgattttaagtttattaatttttttaaagaagtaatagaagtaattttttgttgtatttttggtttattagattaaaagatttaatagtaatgagatttaattgtatatatataaaattatttattttaaaaataatgataatatataatggtaaaaggaaaaatatttaatatataaaaaagtataattaaaaagtattaaaagtattatatagtgtaaatattaaaaagatagagttattaatttagtggtgtttataaggaaaattaggtaagaatgtagaaaatgtttttttttttttttatttagtgagttggttatatttaataagttgttgttattattattattattattattattagcgaaagattgaagttttattattatttaatttagttttttaaaaagttattttaaattgttgttttttttttatttgatgaaattatatttgttgtttttgtgattttttgatcggaaatatttggaaaattttatgttttttatatattgatagtgtattttatgttattatttagtgtatgtagaaaggatgtttgggttaggagtagtgttaaaaaaatttgtggtttttaagttttaaggtatataaaaattattgggaggtgtgtttattaaaatatatttttttgagttttatttcgatattgtttgtaggttttagtgtggttttaaaacgaatattttttttttttttttttttgagacggaatttttttttgtagtttaagttggagtgtagtggcgcgatttcgatttattgtaattttcgtttacggatttaagtgatttttttgttttagtttttcgagtagttaggattataggtatgcgttattatatatatttaatatttttgtatttttattagagacggggttttattaggttggttaggttggtttcgaatttttgtttttaggtagatttatttatttcggttttttgaagtgttgggattataggcgtgagttatcgcgttaagttaaaataagtatttttaaataagtatttaagtgtttttaaggtagattgttcgtagatttaaaaattaatttaaaaatttaagatacgttaatgttattttattcggtttttttttttttattttttttttttaaattgttttaatagtttttaaatgttgtgtttagttaaatttaatttaattacgtcgattttaggtttgttatttgttggttaaagttattttacgttattttatttttatttttatttttcgcgagtttttattttataatttttttttttttttcgagtttttttttcgtttggcgcggttttttttacgtcgttcgatttattttttaagtttttttcgttcgttattcgtataattggcggtacggtcgtttgttttttattttttagttttcgttttcggtatttcgtcgacgaaggttaagagttatattttacggtagttttatgagtcgttttttcgtcgagttcgggtggggggaggggtggtagttatagattttagggtttcggtagtattttgaaatggcgagtaatgaagtcgtaattttcggttttttatacggttttatacgagggttttcggtgaggttttcggaaattatagatggagtaatgggaggattagagagttagaaaggttgagtttattattatagagtagattttagttcggggagagagtcgtggggttcgaacggttgaaagtcgttagatttgaagagataataagtgagggatttgtagggttttgtgatatttatagacgtgtattaggagattagaaaatagagaagaggaagagttaaggttataattataggttgtttttagtttttcggaaaaattacgttttttttgttattttttagtttttatttttattttttaagggtggtagggaagggaaacggagcgatggcggtattagggtggtaaggaagtttgaagttatgttaaataaatagttgaaagtattagtcgttgtggtttacgtttgtaattttagtattttgggaggtttaaggtaggcggattatttgaggttaggagttcgagattagtttgattaatatggtgaaattttgtttttattaaaaatataaaattagtcgggtgtggtggcgtatgtttgtaattttagttatttaggagaatcgtttgaatttgggaggcggaggttgtagtgagtcgagatagcgttattttagtttgggtaataagagcgaaattttttaaaaaaaaaaaaaaaaaagaaaaagaaatagttgaaggtttaagggagtttttaatttgtatataaacgagggaggtcgggcgtagtggtttttttttgtaattttagcgtattttgggaggtcgaggcgggcggattatttgaggttagtagttcgagattattttgtttaatatggcgaaattttcgtttttattaaaaatataaaaaattagcggggtatggtggcggttatttgtaattttagttatttaggaggtcgaggtaggagaatcgtttgaattcgggtggcggaggttgtagtgagtcgagatagcgttattgtattttagtttgggcgataagagcgaaattgtattttaaaaaaaaaaaaaaaaaaaaagagggaaagggttgagtatagaaattggaagttgtttttaaataattgaatagtataatattgggtttaagtagtttttttgttttagttttcggagtagatgggattataggtacgcgttattacgttaagttatattttgtatttttagtagagatagggttttattatgttggttaggttggttttaaatttttgatttcgtgatttattcgttttagttttttaaagtgttggtatgataggtgtgagttatcgtatttggttttggttaatttatttttaatgttttaacgttgttttatagtaatatattgaattgtataaatgtataatgaattgttgtatagtaattgtattagttttttagagttgttataataaagtattattgaatggtttaaatagaaatttatttttttatagttttggaagttggaagttgaagattaagttgttagtaagttaggttttttttgatgttttttttttttggtttgataaatatgttgattaggttatggtgaagaatagagttttttttattatggttgatattgatttgtgagtaattgtttattttttaatttttttaaaaaaatagatatagggttttattatgttgtttaatttggttttgaatttttggttttaagtgattttttttatttggttttttaaagtgttaggattataggtataattttgtaattttataggtggtatttattaggttgtttagttaattttttgtttgtggttgttttgttttgttttgttttgttttgtttttgaggtggagtttttttttgttgttaggttggagtgtagtttgtttttttattgtgtttttgtgtggttgtttattgtttgtatgttgtttatattttaattttttttttttatgaggatattaattatattgggtttatttatgtgattttattttattttaattatttttttaaaggttttgtttttaaatatatttttattttgaagtattggggatggtgtttaatatgatgtttgagagggatatatttagtttataatagtaacggatgtattataatttttatttatttttttttttaataaatatttaggtattatttaatcgtttgtcgttgtaaataatgttgttattatttttatgtttatgggaggtcgaggtaggtggattacgtgaggttagaagttcgagattagtttggttaatatggtaaaatattgtttaaagatataaaaaagattagtcgggtgtagtggtaggcgtttataattttagttattcgggaggttgagggaggagaattgtttgaattcggaggaggagattgtagtgagtcgagattgttttattgtattttagtttgggtgatggagttagattttattttagttaattaaaaaaaataaaacgttgataaatatgttgacgaggttatggtgaagaatagagttttttttatcgtggttgatattgatttgtgagtaattgtttattttttaatttttttaaaaaaatagatatagggttttattatgtcgtttagtttggttttgaatttttggttttaagtgatttttttttatattttggttttttaaagtgttaggattataggtgtaattttataattttataggtggtattcgttagtacgtttagttaattttatgtgtgtggttattttgttttgttttgttttgttttgtttttgagacggagtttttttttgttgttaggttggagtgtagtggtacgattttagttcgttgtatttttcgttttttagatttaaacgatttttttgttttatttttttaaattgttgggattataggcgcgtgttattacgttttagcgtgggcgatagaggaagattttattttaaaaaaaaaaaaaagaagaaatgaaagaaagaaatgaaattggaaattggtttaaaaatttaattgagtgattattatttttttttttaagaattatgtttataaattattgattcgaataaaaagataggaaatttgggttttagtttagttatttgtagaaaatagaagaagttatataggttttcggtttttagttttttaatttgtaaaataaaatggttgaatttagttattttttatggtttttttagttttaaaaaaattaaaagttagtattattggtttatagtttttttgaaaaaaaaatataattaatgattttatatatattaaaaggtataaagaatatgattttttagttgggcgtagtggtttaggtttgtaattttagtattttgggatgttgaggcggacggattatttggggtcgggagtttaagattagtttgtttaatatggtaaaattttatttttattaaaaatataaaataattagtcgggtgtggtggtgtatgtttgtaattttagttattcgggaggttgaggtaggagaatcgttttaattttggaggcggaggttgtagtgagttgagatggcgttattgtattttattttggaaaatatagtgagattttgttttaaaaaaaaaaaaaaaaagaatatgatgtttttttttttatttttttttttaagaataatatatatataaagaagttttttgtagttatttttatggtattttttttttttattttttgggaattattattttgaatttggtatgtatttttgttatgtatttttttagatttttagagtttatatgtgtatatattttttaaaaatttgtttatgtttttaaaatttttataaatggtattaaattatatgtggttgggaggttaaggcgggtagatcgtttgaggttaggagtttaagattagtttggttaatatggtgaaattttgtttttattaaaaatataaaattagttaggtgtggtggtgtacgtttgtagttttagttatttgagaggttgaggtaggaggatcgtttgaatttaggaggcgggggttgtagtgaattaagattgcgttattgtattttagtttgggtgatagagtaagattttgttttaaaaaaaaaatttttttttgtatattaagattatagtaaggtggttttattaggatagaatgtattatttaaatttataaattttttttagaatatttagagaaagaatttttttttggttaagagttttatattaaagaaagaatatttaaattagaagtatgggtaaaagggtttgtagtaattaaataggttttgttaggtaggtaataaaggggagttagtgtttagtttttagaatatgaggtattttgaatatatattttagagtttggtatattaagagtataataggtttttagatttttttaaggaaatttataggttttagaattgttttttcggatttaatttttataataaatgatgaggtagaaaagggtaggtatgtatattgttttttatatatgagaaaaattgaggtatacggacgttaagattggtatttaatatttaattttatttttatttaagaggtatttaatagtgtatagttagagattaaagaaagttatatttaaggttgttatgaggtttattttgttaagtg

SEQ ID NO: 55 - DNA, 6224 bp, Artificial Sequence
  chemically treated genomic DNA (Homo sapiens)
  unsure (2227)
gtatttttatttgattatttatttgataaatgaggatagagtttatatttataaaaggtaaatgataatttggttttggttaaaaattaagttatagagaatttttgttttagttttaaaggttttgtgtatcgtggtttagtattttaaagtaggggagaggttgagtttataagagtagggagttaaggattttcgttgttttattttggtgtttaattttattttttttaatttgtatattgagttttttggggtttgggtttagtaaagtgttaaaatggttaatttatggttagaattagaaaagtttattttagaaattgggcgattcgggttatgattgtttcggttttaggttgtagtatattttttgtggataataaatttttatttagtgttaggcggtggtgttttgggtattaaagtatagttgtgaaaattagagatgaggtattttagattttttttcgggatattagtttttggtaggtttatttgtaattttggaatattagggtttggggtagggagagttagttatataatagtttgttttggttatttattagtttttgtttttgagggttttacgtttatttgtttatgtatttagtttttttaaattagtatagatgggtaggttgtttgtttttaaaagtgaaatgggagtttttgaaaatgtatatttttttaggtatttttttgtgagttttgttgttattttagagaggtggaatagtgattgtcgatttaggggtggtattcgttggataagatttttgttatattatattgttgtattttaaggtgaggggtggaatagagggttggattgaagattgtggggaaaagaaagattagattgttatcgtgtgtatgtagaaaaggaagatataagaaattttatgttgatttgtataaagaaaaattgtttttgttttgagatgttgttaatttgtaattttagttttaattttgtgtttataaaaatatgtgttatattgaattaaggtttaagggatttagggttgtgtaggatgtgttttgttaatatatgtttgtagatagtatgtttggtaaaagttatcgttattttttattttttattaattagggatatgatgtattgtggaaagtcgtagggatttttgtttaagaaagtttgggtatttgtttaaggtttttttttattgagatagtttgagatatggtttcgtgggaagggaaagattttattgttttttagttcgatatttgtaaagggtttgtgttgaggaggattagtaaaagaggaaggtttttatttttcgtatatttttgggaacggaatgtttcggtgtaaagtcgattattggttttatttattgagataggagaaaatcgttttgtggttggaagcgaaatatgttggtagtaatattgttttgttattttttgttatattgagatgtttgggtaaagagaaataaaaatttagtttatatgtatattttagtatagtatttttttttgaatttatttatgatgtagatttttttatttatatgtttttttgttgattttttttttattattattttgtttatttcgttttgtttgaagagggtttgtttttttatatttgtgggtatttttcgtaaggtggagacgagaaattgagaaaagaaatgatatagagataaagtatagaggaagaaaagtgggtttaggggattggtgtttagtaattgaggatttatattagtattggtttttgagtttttttagtatttattgattattatttttattattttggtaagagggatgtggtattatatattataattataaggtaatggtggggagggggttaataggaaaaaatgtgagtaaaggatttagtgttataagtaagtttaaggaaaggtgttgtgtttggatgtgtatataggttagatttatgtttgattttatataaatattttagtgtagtaaagagtagtattgtcgttagtatgttttatttgtagttataaggcggtttttttttattttagtaaatagaatgtatggttgggttttatatttaagatattttatttttagggataagtaggagatagatgttttttttttattttaattgtaaagaggttttttttttttattaatattttttagtatcgattttttacgggtgtttgtaaagaggttttttttttttattaatattttttagtanagattttttacgggtgtcgggttgggggattgtaaggtttttttttttttattaggttatattttagataattttagtggggggaaatttggataatatttaggtttttttgggtagaggtttttgcggtttttcgtattgtattgtgtatttggttaatcgagaatggagaatggcgatgatttttattaagtatattgtttgtaaataaatggttaataagttatattttgyatagttttaaattttttaaattttgatttaatatagtatatgtttttgtgagtatagggttggggttaaggttatagattaatagtattttaaggtagaaaaattttttttagtatagattaaaatggagttttttttgttttttttttttatatagatatagtaatagtttgattttttttttttttttttatattgtcgtattttttttgtcgagatagtgaaaatagtaattaataaatattgagggaattcggagatcgatgtcggttatttgggtttattttatattttgtttttgcgttttatttttttttttagtttttttttttatttgacgagaaatatttataggtgtgaaggggtaggatttttttaaaggttaaggttatggaggtttttttagtgaaaattcggggcggggaggtgaggagagttttggacgaacggaagaacggggaaggttagcgtagggtttgagtggttcgtttatcgatatagatgttttttagttgtttcggttttagatttacgtttttgagaatcgcggttatgattgtcgagagaagttcgtcgggggtggtgttttgtagtagaaagagtagtcgtagtgatttttatttttttatgtttattttagggagataaagcgattatagttgggtgcggagttgttttcggcgtttaggataattaaatatacgaatcggattttagttcgcgtcggcgtttttttatattcggcgtttagattttcgggttttattttgaagtcgtcgcggttcgttcggtagatggtcgtgcgtcgttcgtgtattattattacgttcgcggtcgaggtttgcggggtatcgtttaggtaaggcgcggtttgcggtatttagtcggaatcggtcggattttttaggtggtttagtattatttgtagtttttgtattgcgtaggttaattttgtagattagttattagttcgggaattgatcgcggagttaatagatagtcgttcgtatacgcgtagaattatattttagtttttaaggttttaatttcgtttatagttttgcgaatagacgcgagcgattttttaaaagtttcgtttatttttagttttagttaattataaggagagtcggtttgggaattcgttttttttcgttatcgtttattaagttttttataggagggtttataggtatcgtttagtcgagttttttatttaatgtttcgtttattttggtttatcgtagttaattagaaggtgtatttttacgaattttcgtttagaaatgtagatcggaagtttttttattttttgtagttaaattcgagatttgatttttaaatttttgttttttgttcgtagttaaacggaaggttgggtagttaggatcgtttattgtttgggggttggagatggaagtcgaggttttaatttttttatttattttttaggaggttttgttattttttcggttttagtattcgagttgggggatttaaatattttcgagacgttcgagttttgtttcgacgtggttgggtttttttattttttcgagaagatagggaatttgggttttcgggttggtcgggagaatagattttatagatatgcggggtgtgataagttttttaattggagaatgaatattttatatttttattagttttatatttaattggaatgattttattagtgtttatttttcgtgttaggttggggtttttattaaggtagagaggtattatgtattcggggagtttgcgatatttttgatatttagtagatgattaataagtatttgtcgaatgagtaaatgaatgaattagggttttttaggttaggattgtgtttttaaatttaaagggtaaggttacgtgtttttttgatttttaatagtagggttatgtttttatttgagattttggagagtagtgttgggttttttatagatattaaaggatagggtgttttgtgttttttaatttagtgttatgacgtttttaattatttcgagggtagggttacggtatgttttaggttttagaaggtagttgttcgttttttatttttatttcggggagtatagtaggggtttttttatatttttattggtaggattgcgtgttttttagagatagtggagggtagagttggtgtttttttatttgtttttttttcgttattttcgagggtaggatcgtatgaattttttagattttttcgtggaagaattgtggttttattagattttaaaaagtaaggttcgttttttataattttcgaaggagggtcgtttttatttcgtcgttaatttattagtattattattagattttcgagggcggtgtcgtggatttttttagattttaaaaggtagatttttattttttacgttttttatattattcgtttcgagattttaagggtagaggtgggtattttcgttttcgtatttttgttcggggttttagattgtagggtarggcggcgtttttcggaaagcgaaagcggcggggcghggcgggtgttaggagaaagaggaagcgttggtagataatgcgattcgatcgcgttgaggttttaggatcgttcgttatggttgtaggaggtttcggcgcggggtttgcggtttcggttttttttatattttttttttttttggttgtttttaatatgcgagtgcggcgtcgtttgtttttgtttttgaacgtgcggatataggtggcggtcgattggatcgcgttggcggaggagatggattttgagtatttggagattcggtaattggagatataagcggattttattggtaggttgttggacgtttggtagggacgttttggcgtttttgtaggtcgattgttcgagttgtttattaagttgggttgcgacgacgtgttgttggagttgggatttagtattggtgaggacgttttttttttggtttcgtatttggggggtgaggaggttgatttttcgcggttttagtattttgttttttatggagagattttattttttgtttcgggggttcgaagaagtttgtagagggagaattatgcgggtttcgtttttttttaataatcggtcgcggttattaagaaggattggagaaaggttcggataggcggagatgggaaggaagtagtttaggtagaggtttttaggtagggttaggagttagaattaggtttttgtgggggtatttgggttgttttaagtagagtaataggataggtggggcgattgatagtggattgttttagaaattttaagttttggggaaatgtagtttttttttttatttattggtatttatataatatatatgtataggcgttggatatagtcgtttatagataggtatattttgttgagttggaattattgtattataattagtgggttttttgagtttttttggtatgtttagttttttgtttatatttgttttggattttagaagaagtagatttattttggtattatttttaggatttttaggaagggatagagatataaatttgattttgatggttttttagaaagttagaatattattgatatttttttgggttagttagagttagtgggagtttaattttttagagtcgttgagtttcgcgtggtattagtgaattggggaagttttttagaataatttagttagaggaggtgggatagcggttggattttgattgtgggtaaagaggtaggtatttttagggaggttgttttattttgttttttttttataga

SEQ ID NO: 56 - DNA, 6224 bp, Artificial Sequence
  chemically treated genomic DNA (Homo sapiens)
  unsure (3998)
tttgtggggaagagatagagtaaagtagtttttttgggagtgtttatttttttatttatagttaggatttagtcgttgttttattttttttggttgggttgttttagagggtttttttagtttattggtgttacgcgaagtttaacggttttgagaagttgagtttttattggttttaattgatttaaagggatgttagtggtgttttggttttttggaaggttattaaagttaggtttgtatttttgtttttttttagggattttaagaatggtattaaggtaggtttgttttttttgggatttagggtagatgtgagtaaggggttgggtatgttagaaaggtttaggagatttattggttatggtgtagtgattttaatttagtaaggtgtgtttgtttgtgggcggttgtatttaacgtttatgtatgtatattatgtaagtgttagtgagtagaaagaagggttgtatttttttaggatttgaggtttttaagatagtttattgttaatcgttttatttgttttgttgttttatttgaaatagtttagatgtttttatagaagtttgattttgatttttggttttatttgaaagtttttgtttaagttgttttttttttattttcgtttattcggatttttttttagttttttttaataatcgcgatcggttattaagaaggaacgggattcgtatggttttttttttgtaggttttttcgggttttcgaggtaggaaatggggtttttttatgggagataggatgttgaggtcgcggaaagttagtttttttattttttaggtacgaggttaggaaggggacgtttttattaatgttgggttttagttttagtagtacgtcgtcgtagtttagtttggtaagtagttcgagtagtcggtttatagaggcgttagggcgtttttgttaggcgtttagtagtttgttagtggggttcgtttgtgtttttagttgtcggatttttaagtatttaaagtttatttttttcgttagcgcggtttagtcggtcgttatttgtgttcgtacgtttaagaatagagataggcggcgtcgtattcgtatgttgagagtagttaggggaagggaggatgtggaggagatcggggtcgtagatttcgcgtcgggattttttgtagttatggcgggcggttttggagttttagcgcggtcgggtcgtattgtttgttagcgtttttttttttttttggtattcgttdcgtttcgtcgttttcgtttttcgagaagcgtcgttytgttttataatttggagtttcgagtaaaagtgcggaggcgggggtgtttatttttatttttgaggtttcgaggcgggtgatgtggggggcgtaagaagtaggaatttgttttttgagatttggagaggtttacggtatcgttttcgagggtttggtgatggtgttagtaggttggcggcggagtgaggacgattttttttcgggggttgtaggaaacgggttttgttttttgggatttggtggagttatagtttttttacggaggaatttgaggggtttatacggttttgttttcgaggatggcgaggaggggataagtgggaaggtattagttttgttttttattgtttttggggaatacgtaattttgttagtaggggtatgggaagatttttgttgtgtttttcgaggtgggagtgggaaacggatagttgttttttggagtttgaggtatgtcgtggttttgttttcgaaatggttggggacgttatgatattaggttggggagtataaggtattttgttttttggtgtttgtggaaagtttagtattattttttagggttttaggtgaagatatggttttgttattgggagttaagggggtacgtggttttgttttttaggtttagggatatagttttgatttggggagttttggtttatttatttatttattcgataagtatttattgattatttattaagtgttaagggtgtcgtaggtttttcggatatatggtatttttttgttttggtggagattttagtttagtacgggaaatgggtattaataaaattattttaattgggtgtaaaattggtaaaagtgtgaaatgtttattttttagttagagagtttgttatatttcgtatgtttgtaaaatttgttttttcggttagttcggaagtttaaattttttgttttttcgaaagaatgggaaagtttaattacgtcggagtaggattcgggcgtttcggaagtatttaggttttttagttcgggtattgggatcggagggatagtagagttttttaggaagtgggtagaggaattagagtttcggtttttatttttagtttttaagtagtaagcggttttggttgtttagtttttcgtttggttgcgggtaggagatagggatttgggggttaggtttcgggtttggttataaaaggtggaaagattttcggtttgtatttttgggcggggattcgtaaagatatattttttggttggttgcggtaggttaaggtaggcggggtattgagtggaaagttcggttgggcggtgtttgtgggtttttttatagagggtttggtaggcggtggcggggaggggcgggtttttaggtcgattttttttgtggttggttgaggttggaggtggacgggatttttggagggtcgttcgcgtttgttcgtagagttgtgggcggagttgaggttttggaggttgagatgtggttttgcgcgtgtgcggacggttgtttgttaatttcgcggttagttttcggattggtggttggtttgtagggttgatttgcgtaatgtagaggttgtaggtagtgttgggttatttgaggggttcggtcgatttcggttggatgtcgtaggtcgcgttttgtttgagcggtgtttcgtaggtttcggtcgcggacgtggtggtggtgtacgggcggcgtacggttatttgtcgggcgggtcgcggcggttttaaggtgaggttcgagggtttgggcgtcgagtgtgggaagacgtcggcgcgggttggggttcggttcgtatgtttggttattttggacgtcggaggtagtttcgtatttagttgtggtcgttttgtttttttggggtgggtatgggggagtgggggttattgcggttgttttttttgttgtaggatattattttcgacgagtttttttcggtagttatgatcgcggtttttaaggacgtgaatttgaggtcggaatagttgggggatatttgtgtcggtgagcgaattatttaggttttgcgttggtttttttcgttttttcgttcgtttagagttttttttattttttcgtttcgaatttttattgggggaatttttatggttttgatttttgaaggggttttgtttttttatatttgtgggtatttttcgttagatgggaggagagattgagaaaagaaataagacgtagagataaagtgtagagtgggtttaggtgatcggtatcggttttcgagtttttttagtatttattgattattatttttattatttcggtaaggggagtgcggtagtgtgggggaaaggaagagagattagattgttattgtgtttgtgtagaaaaggaagatagaagaaattttattttgatttgtattaagaaaaatttttttgttttgagatgttgttaatttgtagttttagttttaattttgtgtttatagaaatatgtgttgtattgaattaaggtttgagggatttagggttgtrtaggatgtggtttgttaattatttgtttgtaggtagtatgtttggtaaaagttatcgttattttttattttcgattaattaggtatatagtgtaatgcgaaaggtcgtagggatttttgtttaagaaagtttgggtattgtttaggtttttttttattgagattgtttgagatatggtttagtgggaagggaaagattttatagttttttagttcgatattcgtaaagggtttntgttgaggagtattagtaaaagaggaaggtttttttgtagatattcgtaaagggtcggtgttgaggagtattagtaaaagaggaaggtttttttgtagttgagataagaggaaagtatttgttttttgtttgtttttgggaatggaatgttttgggtgtaaaatttaattatatattttatttattgagataggagaaaatcgttttatggttgtaggtgagatatgttggcggtaatattgttttttattgtattgagatgtttgtgtaaagttaaatataaatttggtttatgtgtatatttaggtatagtatttttttttaaatttatttatgatattgagttttttgtttatatttttttttgttgattttttttttattattattttatagttatggtatataatgttatattttttttgttaagatagtagagatagtgattaataaatattgagggaatttagagattagtgttggtgtaggtttttaattgttgagtattagttttttgggtttatttttttttttttatattttgtttttgtgttatttttttttttagtttttcgtttttattttgcgagaaatatttataggtgtggaggggtaggttttttttaggtaaaacggggtgaatagggtgatggtggggagaaggttagtaggaaaatatgtgagtaaaggaatttgtattataaataagtttaagggaaggtattgtgttgagatgtgtatgtaggttagatttttgtttttttttatttagatattttagtgtagtaaagagtaatagagtagtattgttgttagtatatttcgtttttagttatagggcggtttttttttattttagtaaatagaattaatagtcggttttatatcgagatatttcgtttttagggatgtgcgggaaatagaggttttttttttttattaattttttttagtatagattttttataggtgtcgggttgggggatagtaaggtttttttttttttacgaggttatattttaggttgttttagtggggggaaattttggataaatatttaggtttttttgggtagaggtttttgcggttttttatagtgtattatgtttttggttaatagagaatggagaatgacgatgatttttattaagtatattgtttgtaaatatatgttgataaggtatattttgtatagttttaaattttttaaattttgatttaatatagtatatgtttttgtgagtatagagttggggttaaagttatagattaatagtattttaaagtagaaataatttttttttgtatagattaatatggagttttttatgttttttttttttatatatatacggtaataatttgattttttttttttttataatttttagtttagttttttattttattttttattttgaaatatagtaatatgatatggtaagagttttatttagcggatgttatttttaggtcggtaattattgttttatttttttggggtgatagtagggtttataggaggatatttggggagatgtgtatttttagaaatttttattttatttttaagggtagataatttgtttatttgtgttgatttggaaaagttgggtgtatgggtaagtgagcgtgggatttttagggataggagttggtggatgattaggataagttgttgtatggttggttttttttgttttaaattttgatgttttagagttgtaagtgagtttgttaagggttagtgtttcgaagaaagatttggaatgttttatttttggtttttatagttatattttagtgtttagaatattatcgtttggtattgaatgaaagtttgttgtttataggaaatgtgttgtagtttggggtcggggtaattatggttcgaatcgtttagtttttgaggtaaatttttttagttttagttatgggttggttattttgatattttattgggtttaggttttaggaaatttagtgtgtaggttggggaggataaggttggatattagaatgaggtaacgagagtttttggttttttgtttttgtggatttaattttttttttattttgaagtgttgagttacgatatataaaatttttgggattggagtagaagttttttgtagtttgatttttagttaaagttaggttgttatttgttttttgtgagtgtggattttgtttttatttgttaggtgagtaattaagtaagaatgt

SEQ ID NO: 57 - DNA, 5291 bp, Artificial Sequence
  chemically treated genomic DNA (Homo sapiens)
aagtgatttatttattttggttttttaaagtgttgggattataggtgtgagttatcgtggttagttttaggggataatttaggttttttgtgtttttgttttaaatttaaatttttatttttttgaggtagtattattttgttttttaggttggagtgtaatggtataattaatttattgtagttttgaatttttgggtataagtgatttttttaatttagttttttaagtagttaggattataggtgtgtattattatgtttggttgaattttttttttaagagatggatttttgttgtgttgtttaggttcgtgttaatttttggttttaaatgatttttttttttaggttttttaaagtgttgggattatagacgttagttattgtatttagtttagtttaagttttaagtattaagaattgattttttggaggaatagggattttttaaggatttttatagttagtgattttaaatgtagtgtttggattagtaagtagtattagtattatttaagaagttattagaaatgtaaatttttggttaggcgcggtgttttatgtttgtaattttagtattttgggaggttgaggtgggtagattacgaggttacgagttcgagattagtttgattaatatggtgaaattttgtttttattaaaaatataaaaattagtcggtcgtggtgaagggtatttgtaattttagttatttaggaggatgaggtaggagaattatttgaatttaggaggcggaggttgttgtgagttaagatcgtattattgtattgtagtttgggtaatagaatgagattttattttaaaaaaaaaaaaaaaagtaaatttttgagttttattataggtttgttgaattagaaattttgaggatgggtttagtagttcgttttaataaattttttaggtggttattataaatgttgaagtgtgagagttattgtttgtaattttatttagagaggtatataggtaatttaaaaataggttttgataaaagaattttattaaatttaaaaaataaatttaggtaattttataaataaataaatttcggtcgggcgcggtggtttacgtttgtaattttagtattttgggaggtcgaggcgggcggattacgaggttaggagatcgagattattttggttaatacggtgaaatttcgtttttattaaaaatataaaaaattagtcgggcgtggtggcgggcgtttgtagttttagttattcgggaggttgaggtaggagaatggcgtgaattcgggaggtagaaattttagtgagtcgagatcgcgttattgtattttagtttgggtgatagagtaagatttcgtttgaaaataaataaataaaaaaaataaattttaaatatggaattatttttttattttttttttttgttttgtttttttttttttttgagatagagtttcgttttgttatttaggttggagtgtagtggcgcgatttcggtttatattgtaatttttgtttttcgggtttatattatttttttgttttagtttttcgagtagttgggattataggtgttcgttattacgttcggttaattgtttttttgtatttttagtagagacggggttttatcgtgttagttaggatggtttcgattttttgatttcgtgattcgttcgtttcggttttttaaagtgttgggattataggcgtgagttattgcgttcgattttttttattttttttaatgttttgtaaatattaatgtatttatatatgtatttagaattttaaaaaattaattttattgagttataattaatatatagtaaaaatgtttttattttgagtaattttatgttttttgataagtgttttgtatttatgttacgattattataatcgagagagaatatttttattattttagaagggtttttttgtagtgagtattttttaggagttttagcggtcggtgatattgatttgttttttgttattgtagatgagatttgtttgttatatataatttttaaaaattaaatgatatgtatggttttttttgtttagtataatgtttttgagtttatttatttgttgtatatattaatattttgtttttttttattatttgtattttatttatggatacgttgtttatttatgtgtttatttttaatggatattgggttgtttttgattttttggttattattatgaataaagttgttatgaatattattgtataaatttttgtgtgtttatgtgtttttattttttttgggtaaatatgtaggaatggaattgttagattgtatggtaagagtatatttagttttttatgatattagtgaattgtttttttaaagatattgtattaatattattttatatttttataattaatgtatgagtttttagttgttttatatttttaattaatagttgatattgtataatataaatgttaatttttagaatatttttataattttagagtagatagtgattttttaggatataaaaattattaattataataaaaattaaaattggattttattaaaattaaaaatttttttttgaaagatattattaagaaaatgaaaagatggttaatagattgagagaatatatgtgtaatgtaaatatttaataaaggattagtatgtaaaatatataaagaatttttataatttagtaataaaaaggaaaatacgtattttttaaatgggttaagaatttaattacggttaggtgtagtggtttatatttgtaattttagtattttgggaggtcgaggtgggtggattacgaggttaggggttcgagattagtttggttaatatggtgaaattttgtttttattaaaaatataaaaattagttgggcgtggtggtgggcgtttgtaattttagttattcgggaggttgaggtaggggaatcgtttgaatttaggaggcggaggttgtagtgagttgagattgtgttattgtattttagtttgggcgatagagcgagattttgttttttaaaaaaaaagaaaaaaatttaattattttattaaagaagatatatgaatgattaataagttattaaattaaaattttagtgagtatatatatatgttttgaagtagttaaattttaaaatattgttttatgtgtgtgtattttttagttaaaaaagtgtttgaaaatagtattattttgaaatttaaaattttaaattttttttttaaattaggtagtagtgttattggaagtaaaagagaagttattttaattgttaaagagtatttattaagaatttataataaatattatgtttaatgtttaaattttagaagaatttatattaaaagttaagaataagataggatatttatttttattattaagtaatattatattagaggatttaattaatgtaataaggtaataaataaaagataaaattgttataattagatattataaatatttaagaaaatttagggggatttatagttatatattaaatagtttagaaggagttttatatattattaatgaatattgagaataaaaaatagtttttaaaatttttttaatttataagggtaataaaatgtataaggtattaaaataaatgtaatgtgtatttgggtataaatatagtaatataatgaaaaggtttattggggaaaaaattatagggagaagggttaataacgtgaagaggtttttttgttatttggatttttggaaaaagatttgttggtttaggtatagttggatgtattatggaaagtggttttaataaatattggtattgtaataattgtgtatgttgatataaaaagagggagttaatgaatatttggtcgattatttaataattgtttttttgttgaagaaatggttttgttggattagagtttaattgtggtttatatattaatgttgttataatagttagaagttttattaagaaatttgttaaattattaaaaagaggaaatgaattttttaggatatttggattgtttttttttaaaaatttagttttggttgggtgttgtggtttacgtttgtaattttagtatttggtgaggtcgaagtgggcggattacgaggttaagagatcgagattattttggttaatatggtgaaattttgtttttattgaaaatataaaaattagttgggcgaggtggtatgtgtttgtagttttagttgttggggaggttgaggaaggagaattatttgaattcgggaggcggggtttgtagtgagttgagattacgttattgtattttagtttggtaatagagtaagatttagtttaaaaaaaaaaaaaaaaaatttagtttgtatggtagtataatattaggtaaaagtatagattagttagattattggttaattttaatttttatgtgtttgagtttttttatttgtaatatggagatgatatagtaatagttgattttggattgttaaaggaattaagtggatatatgtaaagtgtttagaattgtgtttggtaagtagtaggttgtaatattgtgatataataaatatatatatttgatttttatttagtttttggtatagatttttagaaatttttgtaattttttgagtgataggggtgatagaaatattttttattagaatatttggttttggtttttgatataagagtttttaagatttttggaatttttaagtgataagagtgtatgatagtgagttaattggtggttgggattttttagataattttaggatgggggttattttttgaaagattaaggtatgattagaggtttgggatttgtagttttacgtttcgatttttagagagggtaaaagggttggcgattgattaattattaattgttagtgatttagttaattatgtttaagtgatggtatttttattaaaaaataaattataggtttggagagttttcggtttggttaattttaattatatattaagaaggcgatgtattttaaattgtatgaagataaaaggttttgtgtttatttgggatttttttggacgttgttttgtgtattttttcgattgtttgtttatttgtattttttataataaagtagtaaatataagtaaagtttttgagttttgtgagttattataagaaacgatcgaatttgggatttttttttcggaagtcgtttttttttataagggagagagttgttttttttttttttttgcgtgttaaattttcgtttttaaatttatttttcgtgtgtatcgtgtttttaattttgttggtgcgaga

SEQ ID NO: 58 - DNA, 5291 bp, Artificial Sequence
  chemically treated genomic DNA (Homo sapiens)
tttcgtattaataaggttaaggatacgatatatacgaagagtgggtttaggagcggaggtttaatacgtaaaagaaaaaggagaatagtttttttttttgtgagagagagcggttttcgaaaggaaaattttaggttcgatcgttttttataatggtttatagaatttagaaattttatttatgtttattgttttattataaaggatatagatgaataggtagtcgaagaggtatatagggtaacgtttagaagggttttaggtgagtataggattttttgtttttatgtagtttgaggtgtatcgtttttttggtatgtggttggggttaattaaatcgaaagttttttaaatttgtggtttattttttaatggaggtgttattatttaggtatgattggttaaattattggtaattggtggttaattaatcgttagtttttttattttttttggaggtcgaggcgtggggttgtaaattttagatttttaattatgttttagttttttaggggatagtttttattttgaagttgtttaaaggattttagttattagttagtttattgttatatatttttattatttggagattttaaaggttttagaagtttttgtgttaggaattaagattaagtattttaataaaagatgtttttattatttttgttatttaggaaattataagggtttttggagatttgtgttaggaattggatgaagattaaatatatatatttattatattataatattgtagtttattatttgttaggtataattttaagtattttatatgtgtttatttaatttttttaatagtttaaaattagttattgttatattatttttatattatagataaggaaatttaagtatataggggttaaggttaattagtgatttggttagtttgtatttttatttgatgttgtgttgttatatagattagattttttttttttttttttagattgagttttgttttgttgttaggttggagtgtaatggcgtgattttagtttattgtaaatttcgtttttcgggtttaagtgattttttttttttagtttttttagtagttgggattataggtatatgttatttcgtttagttaatttttgtatttttagtagagatagggttttattatgttgattaggatggtttcgattttttgatttcgtgattcgtttatttcggttttattaaatgttgggattataggcgtgaattatagtatttagttaagattagatttttaagaaaaggtaatttagatgttttagaaggtttattttttttttttggtggtttagtaaattttttagtaaggtttttagttgttatagtagtattagtatgtgaattatagttaagttttagtttaataaggttatttttttagtagagaagtaattgttaaataatcgattaagtatttattggttttttttttttgtattaatatatataattgttatagtgttagtgtttattggaattattttttatggtgtatttagttgtgtttagattagtaggtttttttttagaagtttagatggtaggggaatttttttacgttgttgatttttttttttgtaattttttttttaataaatttttttattatgttgttgtatttatatttaaatatatattatatttattttagtattttgtatattttgttgtttttataaattggaggggttttaaaaattattttttatttttaatatttattgatgatgtataggattttttttggattgtttaatatatgattgtaaatttttttgaatttttttagatgtttgtagtatttgattatgatagttttgttttttatttattgttttgttgtattgattaggttttttaatataatgttgtttaataatgaagatagatattttattttatttttgatttttggtataaatttttttaaagtttgagtattaaatatgatgtttgttgtagatttttagtggatattttttagtagttaaagtaattttttttttatttttagtgatattattatttaatttgaagagaggatttggaattttgagttttaaaataatattgtttttaaatatttttttagttaaaaagtatatatatatagggtagtgttttaaagtttagttattttagggtatatgtgtatatttattgaagttttaatttaatggtttattggttatttatgtattttttttggtaaggtaattaaatttttttttttttttttaaaagatagagtttcgttttgtcgtttaggttggagtgtagtggtataattttagtttattgtaattttcgttttttgggtttaagcgatttttttgttttagtttttcgagtagttgggattataggcgtttattattacgtttagttaatttttgtatttttagtagagatagggttttattatgttagttaggttggtttcgaatttttgatttcgtgatttatttatttcggttttttaaagtgttgagattataggtgtgagttattgtatttggtcgtaattaaatttttgatttatttaaaaagtgcgtgtttttttttttattattaaattataaggattttttatatattttgtatattagttttttgttagatatttatattgtatatatatttttttagtttgttaattatttttttatttttttaatggtgttttttaaaaagaagtttttaattttgatgaagtttaattttaatttttgttatgattgatagtttttgtgttttaagaaattattatttattttaaagttgtgaagatattttaaaagttaatatttgtattgtataatattaattgttagttgaggatatggagtaattggaagtttatatattagttgtgggaatgtaaaatggtattaatataatgtttttggaaaaatagtttattggtgttatggaaagttaagtatatttttgttatataatttagtaattttatttttatatatttatttaagaaaaatgaaaatatatgaatatataaagatttatataataatgtttatagtaattttatttataataataattaaaaaattagaaataatttaatgtttattggggataaatatatggataaataacgtatttataaatgaagtataggtggtaaaaagaagtaaagtattgatatatgtaataaatgaataagtttaaaaatattatgttaagtaaaagaagttatatatattatttaatttttaaaaattgtatataatagataaattttatttatagtgatagaaaatagattaatgttatcggtcgttggaatttttagggagtatttattgtaaaggagtttttttggagtgatgaagatgttttttttcgattgtggtggtcgtggtatgggtatagaatatttgttaaaaggtatggaattatttaagatgggagtatttttattgtatgttaattataatttaataaaattgattttttaaaattttaagtatatatataaatatattaatgtttatagagtattaagagaagtgaaaaaggtcgggcgtagtggtttacgtttgtaattttagtattttgggaggtcgaggcgggcggattacgaggttaggagatcgagattattttggttaatacggtgaaatttcgtttttattaaaaatataaaaaaataattagtcgggcgtggtggcgggtatttgtagttttagttattcgggaggttgaggtaggagaatggtgtgaattcgggaggtagaaattgtagtgtgagtcgagatcgcgttattgtattttagtttgggtgatagagcgagattttgttttaaaaaaaaaaaaaaataaaataaaagagagaagtgaaaaaataattttatgtttgagatttgttttttttgtttgtttgtttttagacggagttttgttttgttatttaggttggagtgtagtggcgcgatttcggtttattgaaatttttgtttttcgggtttacgttatttttttgttttagtttttcgagtagttgggattataggcgttcgttattacgttcggttaattttttgtatttttagtagagacggggttttatcgtgttagttaggatggtttcgattttttgatttcgtgattcgttcgtttcggttttttaaagtgttgggattataggcgtgagttatcgcgttcggtcgagatttgtttgtttataaagttatttgaatttgttttttaagtttagtagaatttttttattaggatttgtttttaagttatttatgtatttttttaaatgggattataggtagtagtttttatattttaatatttatggtaattatttggaggatttgttaaagcggattgttagatttatttttagagtttttgatttaataggtttgtgatggggtttaagaatttgtttttttttttttttttgagatggagttttattttgttgtttaggttgtagtgtagtggtgcgattttggtttatagtaattttcgttttttggatttaagtgatttttttgttttatttttttgagtagttgggattatagatgttttttattacggtcggttaatttttgtatttttagtagagatagggttttattatgttggttaagttggtttcgaattcgtgatttcgtgatttatttattttagttttttaaagtgttgggattataggtatgaggtatcgcgtttggttaagaatttgtatttttaatgattttttgggtgatgttaatgttatttattggtttaaatattatatttagagttattgattgtagagatttttaaaagatttttatttttttaaagagttaatttttaatgtttaaaatttgaattaggttgggtatagtggttaacgtttgtaattttagtattttggaaggtttaggagagaggattatttgaggttaggagttgatacgagtttggatagtatagtaagagtttattttttaaaaaaaaaatttagttaggtatggtggtgtatatttgtagttttagttatttgagaagttgaattgggaggattatttgtgtttaggaatttaaggttgtagtgagttgattgtgttattgtattttagtttgagagatagagtgatattgttttaaaaaaataaaaatttaaatttaaaatagaaatataaaaaatttaaattattttttaaggttggttacggtggtttatatttgtaattttagtattttggaaggttaaggtgggtggattattt

SEQ ID NO: 59 - DNA, 5572 bp, Artificial Sequence
  chemically treated genomic DNA (Homo sapiens)
agaaagtagaaggaaagttttataaaagaaagagaataggttaggtacggtcgttacgtttttaattttagtattttgggaggttgaggtaggtggattatgaggttaggagtttaagattaatttgattaatatggtgaagtttcgtttttattaaaaatataaaaattaattaggcgtgtgtgtttgtaattttagttatttaggaggttgaggtaggagaatcgtttgaattcgaaaggtgaaggttgttgtgagtttagattaggttattgtattttgatttgggcgatagagcgagattttatgttaaagaaaaagaaagaggataagaaaattttttaattggaaggtagatagttgattaaaagggtttattgattgtataatataataatgataaaagattaaattagagtatatttttaagatattttagaggatttaagtaagaagatttaaaaattttgagatagaaaatataatgtaattagaatgttattggttttttaaatagtaattttggaaattagatgataataaagtaatgtttttaaaattatgaaggaaaatgttttttaatttagagttttatgttttattaaattattaattaagtatgaagataaatttaaaatattttttaatatgtaaggtttttaagaatgagttatattatttttagaatatattgaggatatattttgttaaaatgaaggggagaaataaaaagagaaaagtatgtaatttaggaaataagaagtttatagagaaaatgatttttaaggtgttagaggagtataattttaggatgattataagtaacgagttttaaaattagtttagattaggttaggtgcggtggtttatatttgtaattttagtattttgggaggttaaagtaggttggttgtttgagtttagaagttcgagattagtttgggtaatatggtgaaattttcgtttttattaaaatataaaaaattagttgggcgtggtggtatgtgtttgtatttttagttattttggaggttgatgtaggagaattgtttgaatttaggaggcggaggttgtagtgagttaagattgcgttattgtattatagttttattaatagagcgagatttcgtttttaaataaataaataaaattaatttatattaaagtaggggatggagggttttagaatagatgtttttaaaaagagaatagaattgatagtttatttaatgtgattaacgttattgagaggaggaaaatttgagtatatatttgtgattggtatataaaaaaataagtcgatgattaaagaaaaaaaaagaggtaagttttaattgtagaaaaatggtaaagataaaaggtatagttgtgtaataaggaaaaatagttgtaaaaaaaaagaaatgtaattatatatattatatgatttagttatgaatagtatttgtatagttataatattacgggcgtgtaggagtatgaaaagtatatgtgtggtcgggtatggtggtttatgtttgtaattttagaattttgggaggtcgaggcgggtggattacgaggttaggagatcgagattattttggttaatatagtgaaatttcgtttttattaaaaatgtaaaaaaaaaaaaaaaaaaaaaaaaaaattagtcgggcgtggtggtagttatttgtagttttagttatttaggaggttgaggtaggagaatggcgtgaattcgggaggcggagtttgtagtgagtcgagatcgcgttattgtattttagtttgggagatagagcgagattttattttaaaaaaaaagaaaaaaaaaagaaaaagaaaagaaaagtatatgtgttattagtgtattagagttaaatttttttttatatttaaaaatggaaaaattaagatgtataatagtagatatgtatataaaaaataaatatgaagatttttattaatggaaatagttaaaaagtttaaagttttgggtagggtttttagaatggataaggtagagaggggattgttgttttttgttataatttttgtagaattaaagtatgtaatttttttattttatgtatatataatattttgatgttagaggatgaattgtatatgttttagaaatatttgtattgaaggtaaaatggttattttttaatatattagttatttatatatataataatatatttttttaaaattattaagattaatatttaggttttattttgatatatttaaatgaatttgtttttgttagtattattattatattttattttattattaagggtaagtgagtcgttaaaaattggttattttaggttaatttagaggtgtttaatcggggaagaattttattttagggattatgtggtaatgttataatataggtgggggttttttattggtatttaataggtagaagttaacgatgttgttaaataatttataatgggtaggatagtaaagaattatttagttttaaatgtaatagtgttgaggttgagaaattaagttttaagtttttgaggattattttattagaacgttatatataaagattgatgatatgtaaatattttgtaatttaggattgatttagttaaatatttcggtgtaatgttggaagtagtttggttgtgaaatatattttcgggaatattgagaatggtaaagataaaaggtataataaatgataataataataaaatatagagttttgtattttaataattttttttatttatggtttttagggtattttatagattaataatatttattttggtatttatatattattttttatttaaggattgtaggtatttttataatatttttacgatgtaggaagtattattatttttattttatatgtaagtaaatagaggtataaaagttaagtaatttgtttaaagttatataagttagtagtagttaaaatttttgatttagaatttattaatattaagagaattggtttaagttatgtagtgataaatttatgtggggtgttattttagtttatttaaagtttatcgtttttaggttgatattgtatatttaatattttatttgttataattttttttttttttatatattttttagagattaaggattttaagtttttagaagggattatgtttattgagtgtttttttcgaattaagtatattttatgtgtagtgttagtttttaagatagtttaaatataatgtaattgggaggttgagagtaggagaattgtttgaatttaggaggcggaggttgtagtgagttgagatttcgttattgtattttagtttggcgatagagcgagatttcgttttaaaaaaaaaaaaaatgtaatttttgttgattttatagtatagaaagttgagtattagataatgtaaatatgtttaagattttttagttagttgattatattttttttttattatattttgtagtttttttaggagaaaagttttttgataagttataaagtatatgaatgtgaatacgtttaatgttttagttttttttattttttttaaaatttagaaaataaattaatgaatatgtaattgagaaattttaggtggtatattggggttggtattagtttaggtaaatagtcgtttagttttttagatttatttttaataaaagtttttaattttttaaggatttttttagagttttcgttatacgttttttataatagttagattaaagattaaaattgtttttttttgagaaatatagagtatgtgaattatttttttttgtttttagttttgtggtaggtaaatattgattgtttatttattatgtgttatttgggtaaaataggaatattaagtaggaagaaaggtttatgttaggtaagagcgtgatttagggtttttttatttttttataaaatggagatttggtatttgtagttttttataatgatgtgttttgatattatttggatatagaaaggttagttttaggtgcgttagtgatagtttatttcgttttgatttagaaattttagatgatttgtattagaggataagtttttggtatgttaataatgaaaaaatagagataattattgttttagtttattttaaattagtattagtgtagcgttagtattttggtagggagttttgttgttaaatttattttttgtaaagaggagaggtagagatagggttaaggggaaaattttaagattggaatcgttaatataataaattgtcgaattgagttttttttttcgtaattttaagatattagtaagtttttttttttagttaattttttttattagggtatcgtagtttttttagaaggagggtgttgggtttgttttaggtttttttatttttttgttcgttgttttagtatatttgaaaagggagtagcgattaggaaaagagatacgtgggtatttttttattttgtttagttattttttgaattattataagttatcgtatttttttttttagttagtagcgttcgagatttttttttaaataatacggttttgtatttaaaaggaagagtggtgggagaagagagaggcggagaagataagtaagaagggcgtggagtgtcgttttcgtttcggagtcggaggcgtcgggaggtcggacgtcgcgaagttgttagtttaggaatgtgtcgtttaattcgtaggtcgcgggcgatcgcggcgggcgcgttgtggtttgcggcgggagcggggtagaggacggttggcgtagggtaggttgtagcggcgggtcggacgcgacgtcgcgtatttgagcgttcgggggcggggcgttagcggttacgattttttttatcgcgcgacgcgtttttcgcgcgtcgtttcggtttttttcgttcgtgtttcggcgcgttcggtttttttcgcgtttttggttttttttttttttttttttttttttttttttttttttttttgttttgggattgtttggatttcgtatcgcgagtttgtcgcggtattttcgcgcggcggaagagcgcgcgttagtttcggtatatttgggagtcggattttagttttacgtttcgttttttataagtttttttaaggtaaggcgttcgtttatattcggttttttttacgttcggcgggatagttgggttttcgttttttttgcgaatcggttaggagtttcgcgtttcgttttgggagtggggttgtagttgacggggatttcggatcggcggtggttagagcgcggagtaggcgatacgacgagtcgataggtggcgggtttagttttagtatttcgatcgtcgtcggcgcggattttggtggggatggggcgggcgggtcgatttgggggtggggttagttttttttttttttttttaggggcggcgatcgtcggggttcgtattgtaggtgcgtgggagaaattttgtagggtggggattcggcggttgttggtcggtagtgattggtgggcgcgttcgaggattttaaggggcgtagttcgggggtagatttttgggtcgggcggggattttacgttttttttattcgtttttttttgttttttattttagt

SEQ ID NO: 60 - DNA, 5572 bp, Artificial Sequence
  chemically treated genomic DNA (Homo sapiens)
gttgaggtgaaagataaaagggggcgggtaagggaagcgtaagattttcgttcgatttaagggtttgttttcgggttgcgttttttggagttttcgagcgcgtttattagttattatcggttagtagtcgtcgggtttttattttgtaaagttttttttacgtatttatagtacggatttcgacgatcgtcgtttttagaagggaggagagaggattgattttatttttaagtcggttcgttcgttttatttttattaaggttcgcgtcggcggcggtcgagatattagggttagattcgttatttgtcggttcgtcgtatcgtttgtttcgcgttttagttatcgtcggttcgaggttttcgttagttataattttatttttaaggcgaggcgcggagtttttagtcggttcgtagaggaggcggggatttagttgtttcgtcgagcgtggaaaggatcgggtgtgagcgagcgttttattttggaggagtttgtaggggacgaggcgtagggttgggattcggtttttaggtgtgtcgaagttggcgcgcgttttttcgtcgcgcgaaagtgtcgcggtaaattcgcggtgcggagtttaggtaattttaggataggagggagggagaagaaggagggagggagggagggagggagttaggggcgcgaagggagtcgagcgcgtcgaagtacgagcggaaaaggtcgaggcggcgcgcgaggggcgcgtcgcgcggtgggaagggtcgtggtcgttgacgtttcgttttcgggcgtttaggtgcgcggcgtcgcgttcggttcgtcgttgtagtttgttttgcgttagtcgttttttgtttcgttttcgtcgtagattatagcgcgttcgtcgcgatcgttcgcggtttgcgagttagacggtatatttttgggttagtagtttcgcggcgttcggtttttcggcgttttcgatttcggggcgggaacggtattttacgttttttttgtttgtttttttcgtttttttttttttttattatttttttttttaagtataagatcgtattatttgagagaaagtttcgaacgttgttggttaaggggaaaagtgcgataatttgtgatgatttagggaatgattagataggatgggaaaatatttacgtgtttttttttttagtcgttgttttttttttagatgtattagggtagcgggtaggagaatagaaagatttgagataaatttagtattttttttttaagaaaattgcggtgttttggtgaaaagggttggttaagaggaaggatttattagtattttagggttgcgggagaaaaaatttagttcgatagtttattgtattggcgattttagttttggagttttttttttaattttgtttttgttttttttttttatagagaatgaatttagtagtaaagttttttattaaagtattaacgttgtattgatgttaatttgagatgagttggggtagtgattgtttttatttttttattattaatatgttagaggtttattttttgatgtaagttatttgaaatttttggattagagcggggtgggttgttattgacgtatttaagattgatttttttatatttaagtaatgttagggtatattattgtgggaggttataaatgttaggtttttattttgtaaaaaagtaggagagttttaagttacgtttttatttaatataaatttttttttttatttaatatttttgttttgtttaggtagtatatgatgagtgagtaattagtgtttgtttgttatagaattgggaatagaagaaagtgatttatatgttttatattttttagggaaagatagttttggtttttggtttggttgttgtgggaaacgtatggcgagagttttggaaaaatttttagaaaattaaaagtttttgttgggaataggtttaaaaggttgagcggttgtttatttaagttagtattaattttagtgtgttatttgaagttttttaattatatatttattagtttgttttttgagttttaaggagagtaagggaggttgggatattaaacgtatttatatttatatgttttgtaatttattagaggattttttttttggaagggttgtaggatatagtggaaagagggtatagttagttagttgagagattttgggtatgtttatattatttggtatttagttttttgtattataaaattagtaaaaattatattttttttttttttgaggcggagtttcgttttgtcgttaggttggagtgtagtggcgggattttagtttattgtaattttcgttttttgagtttaagtaatttttttgtttttagttttttaattatattatatttaagttgttttaagaattgatattgtatataaaatgtgtttgattcgaggaaggtatttagtaaatatagttttttttaggggtttaaagtttttggtttttaagaagtgtatgggagaagaggaaattataatagatggggtattgaatatataatattagtttaaaaacgatagattttgaatgaattaggataatattttatataaatttattattgtatggtttagattagtttttttagtgttaataggttttgagttaggaattttggttgttattgatttgtgtggttttgggtaagttgtttaatttttgtgtttttgtttatttatatataaaatggggataataatattttttgtatcgtgagagtgttgtgaaagtgtttgtagtttttagataaaaggtggtatgtgagtattagagtaggtattattagtttataaagtgttttaggaattatggatgaaagagattattgaggtataaagttttgtgttttgttattattattatttattatattttttgtttttattatttttaatattttcgaagatatattttatagttagattgtttttaatattgtatcgaggtatttagttgagttagttttaaattgtaagatgtttgtatattattaatttttatgtatagcgttttgatgaaataatttttaaagatttggagtttggttttttaattttagtattgttatatttggggttggataattttttgttgttttgtttattgtaggttgtttagtagtatcgttggtttttatttattagatattaataagaaatttttatttgtattgtgatattgttatatggtttttgggataaaattttttttcggttgagtatttttgagttagtttaaaataattaatttttagcgatttatttgtttttaataataaaatgaaatatgatgataatgttgataaaaatagatttatttaaatatgttagagtgaaatttagatgttagttttaatgattttgaggaagtgtattattatatgtatggatagttagtgtattgggaagtagttattttgtttttaatgtaggtatttttggaatatatgtaatttattttttaatattaaaatattatatgtgtataggataaaaaaattatatattttagttttataaggattataataaaaaatagtaattttttttttattttatttattttgaaaattttatttaaaattttgaattttttaattgtttttattaatagagatttttatatttattttttatgtgtatatttgttattgtatattttgatttttttatttttagatatagaagaggatttagttttaatatattaataatatatatatttttttttttttttttttttttttttttttttttttgagatggagtttcgttttgttttttaggttggagtgtagtggcgcgatttcggtttattgtaagtttcgtttttcgggtttacgttatttttttgttttagttttttgagtagttgggattataggtggttgttattacgttcggttaatttttttttttttttttttttttttttgtatttttagtagagacggggttttattgtgttagttaggatgatttcgattttttgatttcgtgatttattcgtttcggttttttaaagttttgggattataggtatgagttattatgttcggttatatatatattttttatatttttatacgttcgtagtattatgattatataaatattgtttatagttgagttatgtggtgtatatgattgtatttttttttttttataattgtttttttttgttgtataattatattttttgtttttattatttttttgtagttaaaatttgtttttttttttttttttaattatcggtttatttttttatatattagttataagtatatatttaaatttttttttttttaatgacgttaattatattgggtaagttattagttttattttttttttggaaatatttgttttggagttttttattttttgttttaatatggattgattttgtttgtttgtttggagacggagtttcgttttgttggtgaggttgtagtgtagtggcgtagttttggtttattgtaattttcgttttttgggtttaagtaatttttttgtattagtttttagagtagttgggaatataggtatatgttattacgtttagttaattttttgtattttagtagagacgggggttttattatgttgtttagattggtttcgaatttttgagtttaggtaattagtttgttttggttttttaaagtgttgggattataggtgtgagttatcgtatttggtttaatttggattgattttaaggttcgttgtttgtggttattttgggattatgtttttttaatattttgagaattattttttttgtagattttttgttttttgaattgtatatttttttttttttgttttttttttttattttagtagagtatatttttagtatattttgaagatagtataatttatttttagagattttgtatattggaaaatgttttaaatttatttttatatttgattaatagtttggtggagtatagaattttaggttagaaagtatttttttttataattttgaaggtattgttttattattatttagtttttagagttgttgtttagaagattagtggtattttgattgtattgtattttttgttttaaaatttttggatttttttatttagattttttgaaatattttgaagatatgttttgatttggttttttattattattatgttatgtagttagtggatttttttaattagttatttgttttttagttaggaaatttttttattttttttttttttttttgatatggagtttcgttttgtcgtttaggttagagtgtagtggtttgatttaggtttatagtaatttttatttttcgggtttaagcgatttttttgttttagttttttgagtagttgggattataggtatatacgtttggttaatttttgtatttttagtagagacggggttttattatgttggttaggttggttttgaatttttgattttatgatttatttgttttagttttttaaaatgttgggattagaggcgtgacgatcgtgtttggtttatttttttttttttataagattttttttttatttttt

SEQ ID NO: 61 - DNA, 5864 bp, Artificial Sequence
  chemically treated genomic DNA (Homo sapiens)
tttttatttttaaaaattgtggtaaaatatatataatataaaatttattattttaattatttttatgtgtataatttagtattattaagtttagtaagtttttatttattatggatagatttttggaaattgtgattttaagtaatattattggtaataaaattaatttgttatgggatgattgatataaataagagttaagtttttgtaatatatttttggttataaaaatattaataaacgtttaaataaagattttaaatattttttattttaaatattgaaataaatgtgagttatatatttaagaaagattgataaaaataagataattttttttggagatggagttttgttttgttgtttaggttggagtgtagcggtgcgatttcggtttattgtaatttttattttttaagtttaagtgatttttttgttttagttttttaagtagttgggagtataggtgcgtattattatgtttggttattttttgtatttttagtagagatagggttttattatgttggttaggttatttgtagtttttaataattgagtaatatatatttttatgaataaaatttggagtatatttggttttttttattcgatttttttagaatttggaaattgtaagtatttttaatttatgataatatagttatttgtataagtgtattaataatttgtttttatttgtaataggatataattggggaaattggttgtttattaatgtttttatttgatttacggagttaattaaatttttttggaaaaatcgtttttataattttgtttatatagtttttgtatagggtttttgatttgtggtaagtaaagaatgttattttttgataggtttaggagttttaagtttattttggaattttaagaggagaggattattaaatttataggtatttgatggtataaatttatggttgggtttagtttttaaaaagttttatttgaaatattttttatggaataaagttttattaaagttaatttaaaagttaatgttaaaaaataattatttttgttgtattgtatataaataattcggttaaatataataaggtaaatttattatgatttgtttttagtataaatgggaaattagagattggaaaattatagtttattagttgttagattttagttttgtttaatgttttttaatttttattattttttatagtttggattaaattttaatttttgtgggttataagtttttaaaataatgtttttaatttttttttttttttttttttttattttttttaatttggagttatttaaaattaagttgttattaaattaagttatttaaaattaattttcgtgaagttttgtgaattgaagtagataatttaaattttagaagaaaataatgggaatttatttatatatataagttatttttatatttgtttattgatgtatggattttagagtaatgtggtttagattaattttttaagattgtttttattgttttttttttttttttaaatttttttttgataggatattagattttataattttttaaaaatgagtttttttaataatttaggatttatttttttaggaaaaaattattttagttatgagagagtagataaaatttgggaatagaaatttattttttttaaaaatgttttttttaaaatattttaaaaaagaaaaggggggaaatgtgaaaggaaattattttggaattttataattattaagttaatgggaaaagttaagttgggaattgtttagggtaaatttgttttttattttatttagttatttttttgtttattgagataaatgtatgtttgattgttttttttagaaaggtgaattagaaatttaaaagagtgtaattatttgttttttatttatttgtgatttggaagtttttttttatttcgagttgttttattttttttttgagttgttttattttttttgattaatatttattttatatatgttgattgatgttttatatttttttaaaatgtataaaattattttgtgttttgattattttaggtatatgtcgttaggattttttgaggttgttataatcgtgtgtttttgattttcgtaagataaattttttaaattaattgagatttgtttttaatttttggggtttatataggttaaattgtaaaagatttgtgttagaggaggaagtttatttagagggttggggggttttattttatttttggtttataggattttgattttttttattattttaagttggtaatgaaaaaaatagtaaaagtatataggattaaggattttaggttgggtatagtaatttatatttataattttagtattttgggaggttaaggtgggaggattgtttaagtttaggagtttgaggttaatcggggtaatatatgagatttcgttttaaagaaaaaaaaaatatgtagaaaattagagaggataaattaaaattttaataagaaaaatatattaatttggaaatttataggaaatgggtgattgtttaataaaaatatatatgaataaaaggaattttaaaataagaaatatataaataggttagttagtatagaaaagtttggaatgatgtttagatattttttattggaaaagattttagggatatatagatttagagttaagttttaattgaatttggttaaatttgttgatttttagtaaattttgattttatttaaaatggttaaggtttagttgagggaaggggaaagaagtgattttttttaattatttttacggtataatttttgtgaaaggaaaataaaatttaggattataaaattattaaattaaagggtaaagttaagttggaaattatgttaggtaaatttgttttttattttatttttaaataagatagttgttaagataagaggttacgtattttttttaaaatttgtttataaggaaattttttgtggataaaggatagatagaatttaaagttatttttttaaggtgcgtttgagataaatgtatatttaattgtttttttttttttattgtttacgtaaaaatgataatttattgagttagattaaattgtgtatttagtggaaggttgattaaggatttaaaaaaatgcgattttttgttttttatttatttatgatttggaagtttttattttaagtttcgttttatttgattaaagtatattttatatatattgattgatgttttatgtttttttaatatgtataaaagtaagttgtattttgattattaagggtatatggttattagggttttttgaggttgtgttacgggtgtaattttaattttggtgaaataaattttttaaattgatggatgtcggatgtggtggtttatgtttgtaattttagtattttgggaagttgagacggatagattaattgaggttaggaattcgagataagtttggttaatatggtgaaattttgtttttattaaagatacgaaaattagttggttgtattggtatatatttataattttagttgtttaggaggttgaggtaagaggatcgtttgtttgggaggcgaaggttgtagtgagtcgagattatgttattgtatttttttagtttgggtgatagagtaagatgttattttaaaaaagaaaaaaaaaaattgatggagagttaatttttggtttataatgtaaatgtttatttaaaaatagatattattttatgtattattataaatatattgttatttagttgttcgggaggttgaggtaggagaatgtttgaattcgggaggcggaggttgtagtgagtcgagatcgtattattgttttttagtttgggcgatagagcgagattttattttaaataaaataaaaataaataaatatattgttaattaaattgtgattttgttaaaaataaatgttgttgatgattttatttttattaaagttattgtagtagttaagggaaagttttttttttgttttttgaaggtttattgaaaagttaattgataaaaggtatattaattggagaaagggtatataaatttattaatatgtatatgggggagaattagagtgattttgttgaagttttaaatggggtttagaaatttatatattattttgaggttatagaatgggggtttggattgtggtataataggttatgcgggtggagatttggttgataattacggttttgttatgtaaatgaaattttttaagtagaattttttaaagagaataggtggtatatgttttttttagatttttgtaaattaatagtaaaattttaaattttttaatcgattgatggattttttgtttgtttaagggtattttgaagttaatttgaaaaattagtttaggtaatgatgggaagtgggggttggttatgttttattatatattttttttttggaatttaggtatagtaagttagtattaatattaaaatagagattttaagattgatagaaaagatttttttgtagaggtttttttattatttttaggtatataggatttttggttttcgttgtagggtttttattttatttgtttaatttttatttgttttttattgtttatttttggttagtattcggttagcgtataggttttttatattttgaggtggatattagtagggaaggtttgcgggagggttttgtttttttggcggttattcgtaggtttatagtaagatatgtgtagaggtgagcggagcgtcgttattagttgttatttttttaaagattagaattattttagagtattcggaggtattaggaaagcggttcggaggtagaggcgttaggggcggggttgatgtcgagaggttttttttgtttcgttttttcgtattggttttgtaatcgttttcgttagacgcgttttcgttttttgtttttcggaaaggtgttcgttttttgtttttcggttcggcgttcgattttcgtttttcgatttagttgtgggttgcgttttacgttagttcgcgtttcgtatggttgtcgtcggggttaggtttgtggagttgggtttcgtcgagtcggcgtcggcgtggcgattgcgtagcgagtagttttttagtaaggtgggcgggcggtcggtatggttgggcgcggtcgggttgtcggggttttaggttttggtttgcgagttgtgcggtcgttcgtttttttttttgttgtaggtgtatgcgtcgttgtttggtcgttcggacgttttttatcgttgtattttttttttttgttgtcgcgagtagtcgtgttgtgtcggtttgcgaggtgagtcgttaaacggggtcgggacggggttatgttttcgacgcgtgcgcggcgttaatttcgggagcgattagggggacggcggtaagtatcgttgtcgttttagttttagagtttttttttcgcgttgttttaggagtattttttttcgggtttttttaggatgtgtttatttttgttatataagtttttaattgtgtttacgcgtattggtaatttttagtttttaattagtgggtattaggtatggtgttaatttagataatagaaattgttttggaaagatggattttagtagttttttcgtatttttggtagtcgtttttaacgattagttttattaatttgattaatttaaattatttttaggaggtaatttagttgcgtgtatcggacgaaatttagtttttggattttaaaagtttatttttgaaagtaaaaatttttattttttttttgttgttgttatttttagttttacgtgtagaggataaaatatgtgaattgttgttttgtttgaagataaaatttttttttgtatttttttttagt

SEQ ID NO: 62 - DNA, 5864 bp, Artificial Sequence
  chemically treated genomic DNA (Homo sapiens)
attaaaaaagaatatagagaaaagttttatttttaaataaaatagtaatttatatattttattttttgtacgtaaaattgaaaataataataataaaaaagaaatgaaagtttttgtttttaggaataagtttttaaaatttagaaattagatttcgttcggtatacgtaattgagttgttttttagaggtggtttgagttaattaaattaataagattgatcgttaagaacgattgttaaaaatacgaaaaagttattgggatttatttttttaagataatttttattatttgaattaatattatatttggtatttattgattaaaagttgggggttattaatgcgcgtgggtatagttagaagtttatgtagtaaaaatgagtatattttggaagggttcgggagaaggtgtttttggggtagcgcggagagggagttttgaggttggggcggtagcggtgtttgtcgtcgtttttttggtcgttttcggaattaacgtcgcgtacgcgtcggaggtatggtttcgtttcgatttcgtttggcggtttatttcgtaggtcggtatagtacggttgttcgcggtagtagaagaggaagatgtagcggtggaaggcgttcgggcggttaggtagcggcgtatatatttgtagtaggaaggagagcgggcggtcgtatagttcgtaggttagggtttggggtttcggtagttcggtcgcgtttagttatgtcggtcgttcgtttattttgttggggaattgttcgttgcgtagtcgttacgtcggcgtcgattcggcgaagtttagttttataggtttggtttcggcggtagttatgcggggcgcgggttggcgtggggcgtagtttatagttgggtcggaaggcggaaatcgggcgtcgggtcggaaggtaagaggcgggtattttttcggaggataggaggcggaaacgcgtttgacgggagcggttgtaggattaatgcgagggaacggggtagaggaaatttttcggtattagtttcgtttttggcgtttttgttttcgagtcgtttttttggtgttttcgggtgttttgggatggttttggtttttgggagagtggtagttggtgacggcgtttcgtttatttttgtatatgttttgttgtgggtttgcgggtggtcgttagggaggtagagttttttcgtaaattttttttgttggtgtttattttagggtgtgggaaatttgtgcgttggtcgagtgttaattaagagtaggtagtgaaagataaatgaaggttgaataggtaaagtgaggattttatagcggaaattaagaattttgtgtgtttgagagtaatgaagaagtttttgtagaagagttttttttgttagttttaaggtttttgttttaatgttagtgttggtttgttgtatttgaattttaagggaggagtgtataatgaggtatggttaatttttattttttattattgtttgaattagttttttaggttaattttagaatgtttttgggtaagtagagggtttattagtcggttggagggtttagaattttattgttggtttgtaaaggtttgaaagaaatatgtattatttgttttttttaaggagttttatttaggaggttttatttatataataagatcgtggttgttagttaggtttttattcgtataatttgttatgttataatttaaatttttattttgtaattttaagatggtatataagtttttgaattttatttggggttttagtaaaattattttggtttttttttatgtgtatgttaataaatttgtatgttttttttttaattaatgtgttttttgttagttgattttttagtgaatttttagaggataaaaaggaagtttttttttggttattatagtggttttaatggaagtaaagttattaataatatttatttttgataaaattatagtttagttggtagtatatttgtttgtttttgttttatttgagatggagtttcgttttgtcgtttaggttggagagtaatggtgcgatttcggtttattgtaattttcgtttttcgagtttaagtatttttttgttttagtttttcgagtagttgggtagtagtatatttgtaatggtatataaaataatgtttgtttttaaataaatatttatattgtaaattaaaagttaattttttattaattttttttttttttttttgagatggtattttgttttgttatttaggttggaggagtgtagtggtatgatttcggtttattgtaattttcgttttttaggtaagcgatttttttgttttagttttttgagtagttggaattataggtgtgtgttaatataattagttaattttcgtatttttggtagagatagagttttattatgttggttaggtttgtttcgaatttttgattttagttgatttgttcgttttagttttttaaagtgttgggattataggtatgagttattatattcggtatttattaatttagaaagtttattttattaagattaaggttgtattcgtgatatagttttagaaggttttgatgattatgtgtttttggtggttagggtatagtttgtttttatatatgttagggagatatgagatattaattagtatgtgtaagatgtattttagttaggtaaagcgggatttgaggtgagggtttttagattatgagtagataagaggtaaaagatcgtatttttttgagtttttgattagttttttattgaatatataatttagtttggtttagtgaattattatttttacgtaaataataggggaggggaagtaattagatatgtatttgttttaggcgtattttaaagggataattttgagttttgtttgttttttatttataaggaatttttttgtgggtaaattttaagggaggtacgtagttttttattttggtagttattttatttaggaatagaatgggaggtaggtttgtttgatatagtttttagtttgattttattttttggtttagtgattttgtggttttgagttttattttttttttatagaaattatatcgtaaaagtaattgaagaaaattattttttttttttttttttaattaggttttgattattttaaataaaattaggatttgttgaaggttaataaatttaattaagtttagttaaaatttaattttgaatttgtatgtttttggggttttttttagtgagagatgtttaagtattattttaagtttttttatattaattggtttatttgtatgttttttattttaggattttttttgtttatgtgtatttttattaggtaattatttattttttgtaggtttttaggttaatatattttttttattggaattttaatttattttttttagttttttatatattttttttttttttgagacgaggttttatatgttgtttcggttggttttaaatttttgggtttaagtaatttttttattttggttttttaaagtgttgggattataggtgtgaattattgtatttagtttagaatttttagttttatatatttttgttgttttttttattgttaatttgaaataataaaaagggttagaattttataaattaaaaataaaataaggttttttaattttttgaatggatttttttttttgatatagattttttataatttaatttgtatgaattttaaaaattggagataggttttagttaatttagaaaatttattttgcgaaggttaaggatatacgattatgatagttttaggaggttttgacgatatgtatttaagatagttagagtatagggtggttttatatattttagggagatataagatattaattaatatatgtaaaatgaatattggttaggaaaggtgggataatttaaagaaaaaatgggataattcgaagtggggaggggtttttaggttataggtaggtgagagataaatggttgtatttttttgagtttttgatttatttttttaaaagaggtagttagatatgtatttattttagtgagtagagggatgattgaatggaatgggaagtaggtttgttttaagtagtttttagtttgattttttttattagtttagtgattatgggattttaaggtaatttttttttatattttttttttttttttttttaaaatattttggagaaagtatttttgaagaaaataagtttttgtttttaggttttatttgtttttttatggttaggatggtttttttttagaagggtaggttttgagttattaggaaagtttatttttagaaggttgtgaagtttaatattttattaagagaaaatttggggaggaagggagaataataagaataattttggaaaattgatttaggttatattattttgaagtttatatattagtaagtaggtatgaaagtggtttatgtatgtaaataggtttttattatttttttttgaagtttaagttgtttattttagtttatagggttttacgaaagttagttttaagtgatttagtttagtgatagtttagttttaagtgattttaaattaggaaaaatggggaaaaaaagaaggaaaaaaattgaaaatattattttgaagatttgtagtttataaaaattagaatttggtttaaattgtagaaaatgataaaaattgaaaaatattaggtaagattagaatttaataattggtggattatagttttttagtttttagttttttatttatattaaagataaattatgataggtttgttttattatatttggtcgaattatttgtatatagtgtagtaagaataattattttttaatattggtttttaaattggttttgatggaattttgttttatagagggtattttagataagattttttaaaagttgagtttagttatggatttgtgttattaaatatttgtgagtttggtgattttttttttttgaggttttaagataaatttgaggtttttgggtttgttagaaagtgatattttttatttattataggttaggaattttgtataggagttgtgtagataaagttatgaggacggtttttttaagggggtttaattggtttcgtaagttaagtaaaagtattggtaaataattagtttttttaattgtgttttgttataaatgaaaatagattattagtgtatttatgtaaataattgtattgttataagttaagaatatttatagtttttaaattttggagaaatcgggtagagagaattaaatgtgttttaaattttgtttataggagtatgtgttatttaattgttaaaagttgtagatagtttgattaatatggtgaaattttgtttttattaaaaatataaaaaatagttaggtatggtggtgcgtatttgtatttttagttatttgggaggttgaggtaggagaattatttgaatttgggaggtggaggttgtagtgagtcgagatcgtatcgttgtattttagtttgggtaatagagtaagattttatttttaaaaaaaattattttgtttttattaattttttttaaatgtatagtttatatttattttaatgtttaaaatgagaaatatttggggtttttatttagacgtttgttgatgtttttgtgattagaaatatgttataagaatttaatttttgtttatattaattattttatggtaaattggttttattattagtagtgttgtttaaagttatagtttttaagaatttatttatgataaatgaggatttattggatttaatagtattgaattgtatatataaaaatggttaagatgataaattttatgttatgtgtattttattataatttttaaaaatgaaaa

SEQ ID NO: 63 - DNA, 13123 bp, Artificial Sequence
  chemically treated genomic DNA (Homo sapiens)
  unsure (4849..)
aggtagggttgtttgatgttatatatttaattatatatatatttttttttttttttttatagttttttacgaggtagaattttagagtttggtgtgtttgtggttggagtatagtagtttttttataattttattgtagtttttattgaatattttggtttgtaaatataaaggattttttgaagtataattttaaataacgtgtggtagatatttgggagaggaaaattgtagatagaaaaatgtggtcggatgttttgtgggcgggcggtagcgatgttcggttaggtggttttaaggagaggaagtagtgatgtattgaggtaagagagttgatagatgaaattatatggattttaagatagagtggaaggagggtgttttaaatattgtagggtgtgtttttattaggttatgagaatgtagttgggatataggtttgtttttttttgtttgtattatcggagtgatgatttagataaatttaaaaattattttattttgaagtatgtttgatgtgaagaggtttaaataatattttaggattaagagttaggagatttaaattattgtttagatatgtattatcgaatttaggtgtgtgattttttgtaagttttttaattttttttattgtaggtttttttttttttaaaataagggagttgggttattgaattgtaagaatttttttagttttagattgttttgattgtttttagtattggaaatttagatataattagaaggtacgtttttagttttttagatttatattgtttaatttagtagttatatgtggttatgaaatatttgggatgtggttaatatgataaaattttttattttattttattgttattaaatttatattaagaaattgatattgtatttagttattgaaaaattttatttatttttgagatagagtttcgttttgtcgtttaagttggagtgtagtggtatataatttcggttaattgtaatttttgttttttgcgtttaagtgatttttttgttttaatttattgagttgttgggattataggaatttgttattatgtttggttaatttttgtatttttagtagagacggggttttattatgttggttaggttggttttgaatttttgattttaaattatttgttcgttttggttttttaaagtgttaggattatagatatgagttattatatttggcgtgaaaaattttagtttgtttaaaataatttaggaatgtgaatttgttttttgtaatagtaaattttgtgaaatttaaatatagattaagtgttttcgatgaaaatttggtatttgaattgggatatgttgtaagtataaaatattagatttaagataatattaaaaaaggaagtaaaatgttttaataatttttgttgattatatgttgaaatgataatgttttagaaatattgggttaaataaaataaattgttaaaattaattttatttgtgtttattttttaaaatatgattagtagaatatttgttaatgtgcgtggtattttttttggatagtttttataggataggttatattttataaattgtagtgagtggttggattggtatattggttttagttgattatggatgttttggagaggaaagttgtgttattttttaaggaagatatttgtattagtttgagttattatttttattagataaaattagttttaattagttttgttaatagtgttttaagagagttaggggatgtgaggttttttagagtttttttggtttttagtgtttttaaaattgtaatgtgttgtaggtattatgagtaaatgtattgcgatatttttatttgagtatatttattatttttatttttagagaggggatttgtttggaggagtttgtttttatttagtgagtatttttgttgggtggggggttgagttacgtttttttagaggttgttggttttgtttgcgtttggttatttttagtttagttataggtttttggtatatttagttttagataggtagtagagtttgttttgttttttttatatgaattttttagaaggagggtgtgttagtggtaagagttttgagtttgaggttttttgttttgtgtaaaattttttttttttgtatttatagggagtaaatatggaatcggtgagaattattttttttgattattatgtggttagtatgcggtgattgatttgatgtgattggggaaggttttttttttggatagaatatggtgagtgtcgtgttattatcggagaggattattttttttggttatatgtggtaagtagtgattgggaacgattatcgtttttagttagtgtgtgattattaatttggagtgatttaggaggattattgtatttgtttgtttggattgttataataaatattatagagcggatagtttaaataatagatagttttggaggttagaggttgttgattaagatattagtaggttttgttttttttgaaatttttttgtttgttttgtaaatggttatttttttgttatgtttttatagggtggttttttagttagtgttgtatgtgttttaatttttttttattaggatattagttattttggattaggggttatttatattattttattttattttaattatttttttaaaggttttatttttatatacggttatattttgagtttttgagggttagaattttaacgtatgaattggaaaagaatataattgagtttataataatcgttatttttggtcggaatgtgttatttaaggatggttaatttaatgaattgtgtggttagaagtaatgattatagaatgattattaggttatttggagattttttatttaagggaatgagagtaggaatatatatttttgatacggtgatgaatgagtttaggtaaatgaggtggatggaggaatgtattgatttttgaatttttttgtaaggttatagatgtattgttttttttttagtattaggaattttttgttatttgaattatagtgtttgagattaagtaagtgtagttgaatgtttttgggatagtgtggtaagttttagttaataaatttgatattaggtataagggttaataatttatttagggttataaaagaaatataaattattagttttgtattaaagaatataaggtagaggtgattaggttgggaatagaaagtaggaattagtagagttttgatttttgaagagggtaatttttttaaagttagaaattgatgaataggtatggatgaggaggatggtgataagttggagttaaggtagaagtaggaaaatgtaagatatgataatatttttaggaggttggttggttatagtagaggtattgtgattaagaggattggtttatagtggtgttagagagagaaaagtttgtgtttaggtgtgaagtgatttgggattggattagtgacggggagtatggggtgagtgtgagaagattgttaaaagttggtaattgatgaaatgttgaaattaaggaggtttaaagttaaatatataattttaaaattattataatgatgtaattttgtgatttttaagaggttattagttttggtattggtgttgagatttttggaatgtaatatttatgtttatgaaagaaaagatgggaatagttttattgtttacggatttttatattttagaaaagttaattttagtgtgtggtattttatttttattttaattttaggtttttttagttagtttaattgttagtaataagaaattagatagatggaagtaatattttttatttgataaggtttaggggtaagatattattaatttgggaggaggagttaatttaagtaataataaatagattttataaaagggttgtgatgtattttatatttttattttggggaaaatgtagtaggaaagggaaatagttagttttataggaatttgtttggtttattgggatagaataagaaaatttgttttttatatgttaattgaatattaagttttttgaaagtaagaggacgattttatttttagtatttttttttacggaagggttttttgtaattatcgtaaatgttttttgaaagtaattttagattatataattaattttatatatgtatgagtatgtgtgtattttatatatataaattaggattatatatttatgtaaaatatttgtgttttgtatagaattttgaaaatttttattgtttttaaaggataatagattttgagtaggttgttgagggtttttatttttttttttagtattataaatgtaaaatcggttatttagtttattgggattttttttatattgtttttagttagtgttttagaagggatattattcgcgatagcggacgttagtagtggggtttaggttttataaatttttaattgatgttgatatttcgaggaatttttgttaagttgtagtaaattgggttttttatttatagggtacgtttcggttttaaggaagatttttaagaagagttagaaaataggtttttggtaggtattgaagtttggtaattagtcgtaggtagttgggacgaattttgcggttttttttttttcggttttcggatatttatatttttcgaattgatttttttgaaggtgggaaggagtatatagagtagtagttttagtttcgcgcgttttttttgtagcgtcgtttttttcgtttttttttcgcggtagttcgagtgcgttttatttgcgtcgttacgtcgtcgcgttttttcgtttcgtttcgggttagttaggcgtcgtatttttttatcggtaggtttcgtttcgtatacgcgttttcggnncggtgtttcgtttttttcgttacgtgatagatttatttttcgtattcgtttcgattggttttttcgatttagggggagggatttggcgaacggcgatgttttagacgcggttgtagtttttaaatcgcgattgtaagtttcggtagtttttttcgttgttgtcgttaggagttattttacgagaagttaggttataatcgtcggtttttgtttggaaaagtaaaagtggattttgttacgttcggagttttttggcgtttcgttcggttggagttagagaattcgttttgtggcggttttcggcgtggggcgggatagcggttttttggagggggtagtttcgggagaatttgcggcggtcggagcggttagtgttttgcgggattggcgggttggttcggggttgcgatggaattagtcgtttcggtatagagattttatacgtgaggaaggaggattcgaggagggtttaggcggtacggttcggttgagaggggtttggatttcgtcgtttttgaggtggttgattgttgttggcgttttttcgttttgcggttggagttcgggttttttggggtttcgcgcggggggcggtcggcggtttttttattattttttttagttcggggcgcgtgtttgtgtttgtgcgtgttcgtgtgttttcgtgcgttttttattcggtcggtttcggttttttttaggtcgcgttaggtagggtttttttcgcggcgggttcgcgcgggttttttttatagtaaggttacgcggtttttttagtttttttcgagttttagttgcggcgtgggcgcgtttttatcgggattcgtggacgcgttttgtttttagttgtttttcgtttagagaaagttcgtgtttattttgtgggacgtttttagttattgtttgggaatagtgttttaaaattagcgagagattaagacgggttatagttgttttcgtgatttttagcgatttgatttttgttttgatgttttgtgatttatttagtgtgtacgatttatttttaaattatattattattggatgttaacgatttttgatatttatttaggttttttgttttattgtagggaaaagcgttttatttgaatttttttcgagggagaagtagagataaagttgaaagaggttttatagtagttggtagttggtattagtttttgtttggattagaggtattttgatattaatttggaaattggaattaagaaaatacgtttttaaaatcgtaatatttattagattttattaatatttaaatatatgaggattgtgtattatatttatcgattgttttgtcgacgtaatgtttatatttgtggtgttaatgataagtagaattttgttagggacgtttgacgtggtgtggttattttacgtttttaagtttatgagaatgtttgcgcggagatagtatagttttgtagaaatgagtggtagcgtatgtaatttggtattttgaatttaggagtataattttattaaaggaaaataaatttatttttttattgataatattgttttttagttttatggtgaattgttcggaagtaatttttaataagtgtttattttataaatattagatcgtgtatttttaggattgtgtattttttaagaaaattggtttatagaagcggtgtaaaagttttaaatttatttgtttcggattttttttttttgagtagatgtttaattaaattttttttagtattttaataattggaggtattaatagatgttttatttttgagatatatattgtatattttagatttttttttttttttaaagtagggatttaaaattgaggtgaaatatatttgtttatatggtaagattttttaaaagtagaatttttgtaattgaagattatttttttttgtgtgtgaatagaatggttgcggttttttttgggattattgattagtgaattacgatttggttaagatagaatgcgtttttaggaagttggaggtttgattaatcgttgtgttagtatatgagtaataaatttgaagaagatataagtatttttatggttgacgtttttaattagataattttatttttaagtttgttttgttttatttttgttaagtgaatattttaatatgttttaaagttttttgataattataagggagaatttttttatgaaaatatttttgttttaattttagagatataagaagttaaggaatttagttaataatatttttatttaatcgttaaattgttttaaaattgtatgtatagtatattgtaatttatattttttgtatgtaagattggtagttaagaatagtattttggtcgggcgtagtggtttaagtttgtaattttagtattttgggaggtcgaggcgggcggattataaggttaggcgttcgagattaatatggtgaaatttcgtgtttattaaaaatataaaaattagtcgggtattgtggcgcgcgtttgtagttttagttattcgggaggttgaggtagaagagttgtttgattcggaaggtcgaggttgtagtgagtcgagattacgttattgtattttagtttgggtaatagagggagatttcgttttaaaaaaaaaaaaaaaaaaaaaaaaaatagtatttttaggtttattatttttaaaggatattgattgatttttttttttataaaaaaattttttgtattgtatgggtatttgttttgttagaaatattagtagttatttatttattatttttttatttaggaaaattttaaatgttagttgttttagttttttataatattgatgataaaatttagtgattttatgtttaagtattgtagtttgtattttatgttgggttgttattaaaggttatttttttgaatattttagttaagaaatgtttttataaagttataagtatgtatttttatttaaatatgttgtaatgttgtaatttttagggtatattttattaagttttttattattttttttttagaatatttaattttaaattttagtgttatttaaaatatatatattagttttttttaatatttatatgtattgtattttggtttatttttgattttttgtaattattttaaaagagggtgtagtgatattgtaagtattgaaaaattttaatagtgagatggtaattttttttttaatttttaaaggtagattttattttgtattgtaatagttattgaataaatagtatttaagcggtgttattaagtaaataatattttataatagaaatttaatttttcgttttgtgagtgataagtattatgtatttgttgtttatttcggaattttttattttattttcgttttttaattttttattttggtttataattaataggtttaattttttttttggaggtgggaagatatagtattaggttttagggttttggtatagagttaggtttaggagttattgtttgatattttagtttttggatagtatatattagaatggttggattagagttagtttagttgattttttattgtgatttttagaggattaagtttatgaattatattttttgtttaaaatattttaaaaaataaaatttgttggtagaatatatatgaggaatataattttttttttgaaattgaaaattattattatttttattttgatattaatatttttaattaatgattaattaaaaatatatatttttgttatattaggagaaagttttttttttatttttgatggacgttaaattttttttttagttttttagggaaagtttgttagtagtaaatgttttaaatgtttatgtagaaaggagttgttttttttagaattttcgggtttattttgttttttgttgtttttttaatgtattttatgatgatttagatttattagtgataaattttgataggatatttatttgaattttttgatttttggaggtttttaaaagagtgatgtttttaattgtagtaggtatttgtattagtagtttatattaaaaataagtagttattttgtttggaaatagtggtaaaaataaaaggtttattggtattatattatagtatatgataaaataattttatttgtgtttttagattttgtggttatttgtttagaattgatattttgtaagtgtaatttaaaatagttattttatttgtttaaatgttgaattaagtagagattagttgtatttagagttttagtattgtaaatttaagatggattttaagtttttttaatttttcgaagatatgagatatatttataaatttttttttttatattttataatttttataatttagtttattaaatatttttaaaatttttatcgggtggtagatattatgttggttgtttaggtataaaagtaaaaggatgttgttttttaaatattgaatagaattgtaatttaatatgttatattttgaggtaaagaagtatgttaaggatttttttatttgaagtataaaggagaagtttttaaattagtttgtggtttttaggtaaagttttttgggggagaggttattttgtgttgagttttgaaggatgtgtaagaagagttagttatttaaggaaagtagaaaggtttttttaggtaaagaagtataataaagatgtggtggtaaaatatgaaatatgagtgcggtaggaaatgtagttggtgtatatttggttttagaggtttttatgtgttatgttgtaagtatttgaaagtttgtagatattggggagttaatgaaggaattaaaatagataatttgattttttaaatgtttttattattgtatattttattttttaaaaatttttttatttgataattttgaaataaatattatgataaatattttttaaaatagagttagaggtttatagagatagttttgtttttgtttatattatatttgttttttgtatttaagtaagtgaaggtttagattaagtttaatatttttttttttttttttttttattgatttatttttaaatttttttggtaattattataatgagaattaatgaaaaaaatttttaaaaataagtgagatattattatttgtagtagtattgtgtgattaaaagtttaattgtgttttattttttattatattttttataggatttaatcgtgtatatatatgtatataaatttatttattaggttttttaagattttttttaaatgttataatttgataaaatgttatgaaatgaattttaaatggagtgagatatataggtaatttagaatcggtaatatgaagtgtggtagaagataagaaaaggtttgggaattgttggagttaaagagaatttggtgggaaatttaggaagatataagaaggagcgatagagagttgatttataatttgtatgtattttatatgaagggtaattagatgtttgaggagggtttggtggataaaggtgatatttatgttttattatatgtaaaattggttaaaggagaggaaatggaaaaatattttggttttgataattggtttagatgtagtaaataaaaggaaaatgaatttaagaaatgtttaatggatgtttaaagtagtttgtgatgtaggtatatttttaataaatagatgaatttatgaggaaattggtatttatattgattttttagaataatggaaaaaaattagtgaaattgagcgttattagaattaagaagatatataagtagttaaaatagaaaataaaaatatttttaagaatgaagtttagattaagttgggatgagaattttgtatatggaaatagtatagttgtttaataatggtagggaattgtagggagagtatttttgggtagaatgttaattttgttttgtggaataatagcgatatgtttttgtgatttgtattgtatttgtgttagtggatatgagtttagtatattttaatttttaatttttgtagtattggaagattaatttttttattatttatattttagaggtagtaaaatcgaagttttttttattagtaaaagggaatgcgaagtaaattataataaaattttattttatttttattatattagaatagttaaatttaaaagtttgaattgggtaagtattgttaaagtagtgataaatcgttttatttagtgttagtgggagtgtaaattgggggtggaaagaaggggttatgtttaatatgttttatttttaatttaaatgaaatatgattaagtaataagattggaaagtaaatgtttgtatatagtgttttttattttatatttgaaatattatatattttgttttttttttaaataattgtgttgtcgtagattaggcgatttaatagaagtatatttttttaacgattttggaggttagaaatttgggattagggtgtttgcggggttggttttttttgaggtttgtttttttggtttgtagatggttgtttttttttagtgtgtttatatagttttttttttgtgtgtgtttgtgttttaattggtttattttaatgattttattttaatttaattatttttttaaaggttttgtttttaaagatagttatattatgagatataggggttagggttttttaatttaggaatttgggggaggatataatttagtttataataatagtaaagttaaataatttaattaaggttttatagttggtatgatggatgaatggaatttagatttaggtgttttttagtttaaaggttatttttagaatgttatattataattttttgatttttagagatgtattttaaaattagttagagttgtttttttaaagattaagagatgtagagaaaataattttattatttagttatgtgaaagttataattttaatttaattttttgagataaggtttttatttatcgtttaggttgaattgtagtgacgcgtttataatttgagaataatattaagaagagaaaatgtagaaattgaaaacgttgaattttaatgatattgttttttggttaagtagattatagttggtatttgaatttaagaagataaagaatagtatatataagtagaaaataggaaaaaaagatgttagaggaggaataaatgtttagcgggttattataggagggtgttaaaagaataataattgatattttattaagtaggtatagtaataagttataagtgttttgaaatatagtatttgttattgttttatgaatgtaattaatataatagttttgataatattgaatgtatataaatattataaatttttagatatatatatgagttttagatatagaatttcgaaataaagttttatgtataggttagttatttttttaataaaattattgagtattttatatatagtaggttttgtgttaggttttgttaaaggagggatttttaagatttttgagagtttttgagtttagtattgaaatatagttaattcgtggaagaagttttattttttgtagttttttacgttagtaatataatttataatatgtgtatttattattaaatttttttagttatgtgaaaataagtttaaaatgaataattattattttgtcgtattaaattatttattatgtgaaatttataattttatttatttatttatttatttatttatttatttattgagataagatttcgttttattgtttaaattgaattgtagtagtatatttatagtttattgtaattttaaatttttgggtttaagtgatgtttttgttttagttttttaagtagttgggattataggtgcgagttattatatttagttaatttttaaatttttttatagagatgggatttcgttatgttgttaggattggttttgaatttttggttttaagtgatttttttgttttagttttttaaagtgttgggattataggcgtatattattatgtttagttgaaatttttataattttaaagaatggagttttatgatgaaattaagtgattgtttgtattataattttattataattattttttttaaattgagaggatttttatcgtagttttattttgaaatgaagttagtaatttcgtttaagtgttatagtgttattatggtttatgtgtatgttttttgtttttttttttttgtggatagaatgtgttttttaaattttttttttttttagttgtattttatagttatatttggagttgtgtaatgtaatgtatattttgtttgagataatattttttttttgtattttttttttttgtatagg

SEQ ID NO: 64 - DNA, 13123 bp, Artificial Sequence
  chemically treated genomic DNA (Homo sapiens)
  unsure (8274..)
tttatgtaaaaaaagagaatatagagaaaagatgttattttaggtaggatgtgtattatattatatagttttaaatatagttataaaatataattaaaaaaaaaaaagatttaaagagtatattttatttataaggaggaaaaaataaaaagtatatatataaattataataatattatggtatttgaacgaagttattgattttattttagaataaaattacggtaaaaatttttttaatttaaaaaaaatagttatgataaaattataatgtaaataattatttagttttattataaaattttattttttaaagttatagaggttttagttggatatggtggtatacgtttataattttagtattttgggaggttgaggtaggaggattatttgaggttagaagtttaaaattagttttggtaatatagcgagattttatttttatgaaaaaatttaaaaattaattgggtgtagtggttcgtatttgtagttttagttgtttgggaggttgaggtaggagtattatttgagtttagaagtttgaggttgtagtgagttatgaatgtgttattgtagtttagtttgggtaataaagcgagattttattttaataaataaataaataaataaataaataaataaataaagttataggttttatataataggtaatttaatacgataagataataattatttattttaaatttatttttatatggttaaagaaatttggtggtaaatgtatatattgtgagttatattattgacgtgaaggattataagaaatagaattttttttacggattggttatgttttagtattaaatttagaaatttttaaaggttttaagagttttttttttgataggatttagtatagagtttgttatgtatgaagtgtttaataattttgttggaagagtgattaatttatatataaagttttatttcgaagttttgtatttgaagtttatatatgtatttggaaatttgtgatgtttatatgtatttagtgttattaaaattattatattaattgtatttataaaataataatagatattatattttaagatatttatgatttattgttatgtttatttaataaaatattaattattatttttttagtatttttttgtagtaattcgttaagtatttgttttttttttgatattttttttttttattttttatttatatgtattgttttttatttttttaaatttaaatgttaattatagtttatttagttaaaaagtagtgttattagagtttagcgtttttagtttttatattttttttttttggtgttatttttaaattatgaacgcgttattgtagtttagtttgggcgatagatggagattttgttttaaaaaattaaattaaaattatagtttttatataattagatagtaaaattgttttttttatattttttagtttttggggaaatagttttaattagttttggggtatatttttaggagttaaagggttgtagtgtagtattttgagaataatttttagattgaaagatatttgggtttgaattttatttatttattatattagttatgagattttaattaaattatttaattttgttattgttatgggttgaattgtgtttttttttaaatttttaagttgaaaaattttaatttttgtattttataatgtgattgtttttggagatagggtttttaaaaaggtgattaagttaaaatgaggttattaaagtgggttaattaggatatagatatatatagaggaaagattatgtgaatatattaggagaaggtagttatttataagttaagagggtaggttttagaagaaattaatttcgtagatattttgattttagatttttagtttttagaatcgttgagaaaatatatttttgttaagtcgtttgatttgcggtaatatagttatttaaaaagaaaataaaatatataatattttaaatgtaagataaggaatattatatataaatatttattttttaattttattatttggttatattttatttaaattaaaaataaaatatattagatatagttttttttttttatttttagtttatatttttattagtattggatgggacggtttattattattttgataatatttgtttaatttagatttttaagtttggttattttagtgtgatgaaggtgaaatggaattttgttgtgatttatttcgtatttttttttattggtgaagaaagtttcgattttgttgtttttaaagtatggatgataaaagaattgattttttagtgttgtaaggattaaaaattaaaatatgttgaatttatgtttattgatataggtatagtgtaagttataagggtatatcgttattgttttataaaataaaattaatattttatttaaaaatattttttttgtagttttttgttattgttgaatagttgtattgtttttatgtataaaatttttattttaatttagtttaaattttatttttaaaagtatttttgttttttgttttaattatttatgtatttttttagttttgatagcgtttagttttattgatttttttttattgttttgaaagattaatatgggtattaatttttttataagtttatttatttattaaaaatatatttatattataagttgttttaggtatttattaagtattttttaagtttattttttttttatttattgtatttgaattaattgttagagttaagatatttttttatttttttttttttggttagttttgtatatagtggagtatgaatgttatttttgtttattaagttttttttaaatatttggttgttttttatataaggtatatgtaggttatgagttagttttttgtcgtttttttttgtatttttttaaattttttattaaattttttttaattttaataatttttaggtttttttttgttttttattatattttatattatcgattttaaattatttatatgttttattttatttgaaatttattttataatattttattaggttatagtatttaaaaaaaattttaagggatttggtaagtaaatttatatgtatgtgtatatacgattagattttataaaaagtgtaatagaaggtaagatataattaagtttttaattatatagtattattataaataatggtattttatttatttttaaagattttttttattaatttttattataataattattaaaagaatttggaagtagattagtgaaggaaggaaaagaaggaaatgttaggtttgatttgggtttttatttatttgaatgtagaaagtaagtgtgatgtgaataaaagtaagattatttttataaatttttagttttattttaaaaagtatttattatgatatttattttaaaattattaaataagaaagtttttaaaaaatagaatatataataataaagatatttagaaaattaaattgtttgttttgatttttttattagttttttagtatttataagtttttaagtatttatagtatgatatataaaggtttttgaggttaagtatatattagttatattttttgtcgtatttatattttatattttgttattatatttttgttatatttttttgtttgaaaaagtttttttattttttttaaatggttaattttttttatatattttttaaaatttaatatagaatggttttttttttaggaagttttgtttaaaaattataggttgatttaaaggttttttttttatgttttaaataagaggatttttggtatatttttttattttaaaatgtaatatgttagattgtaattttgtttagtgtttaaagggtagtatttttttatttttgtgtttaagtaattagtatggtatttgttattcggtaggaattttaaaaatgtttgatgaattgaattgtaagaattatgagatatagaaaaaagaatttgtaggtatattttatgttttcgaggggttaggagaatttgagatttattttgaatttatagtattggagttttgaatgtagttagtttttgtttaatttagtatttggataaataaagtaattattttaaattgtatttataaaatgttagttttaaataggtagttataaagtttggaaatatagataaaattattttgttatatattataatgtaatgttaatagattttttgtttttattattgtttttagataaggtggttatttgtttttaatataagttattaatataaatatttattgtagttaagaatattatttttttaagagtttttaaaaattaggagatttaggtaagtgttttattaagatttattattgataagtttagattattatgaagtatattggaaaggtaataggaagtaaagtaagttcgaagattttaagggaagtaatttttttttatataggtatttaaggtatttattgttagtaagttttttttaggaaattgaaaaagagatttaacgtttattaaaagtaaaggaagaatttttttttggtgtggtagaagtatgtgtttttaattagttattgattagaagtattggtattaagatggaaatgatgatgatttttaattttaaggaagagattatattttttatatgtattttgttaataggttttgttttttaaaatattttgaatagaaaatataatttataaatttaattttttaaaaattataataggaagttagttaaattaattttaatttaattattttagtatatattatttaagggttgaagtgttaggtaatgatttttaggtttgattttgtgttaagattttaaggtttaatgttgtgtttttttatttttagaaaaagagttaaatttgttaattgtgaattaggataaaaggttgaaaaacggaaatagagtgggggatttcggggtgggtaataaatgtatggtgtttgttatttataagacggaaaattgggtttttgttgtaaaatattgtttatttaatagtatcgtttaagtattatttatttagtaattattataatgtaaaatggaatttgtttttaaggattaaagaggaaattattattttattgttaaaattttttaatgtttatagtattattatatttttttttggagtaattgtaaagggttagggatgaattaaaatataatgtatataaatattaaaagaaattaatatatatgttttaaatggtattgaagtttgaggttaaatgttttggaaaaaggataataaaaaatttaataaagtatgttttgaaaattgtaatattataatatatttaaataaaaatatatgtttgtaattttataagaatattttttaattgaaatatttaaagaaatagtttttgataatagtttagtatagaatataaattatagtatttaaatataaaattattgaattttgttattaatattatgaaaaattaaagtaattgatatttgaagtttttttaagtggaaaggtagtagataaatgattgttaatgtttttgataaaataaatatttatatagtgtagaagatttttttatgaaaagaagaattaattagtattttttaaaagtagtaagtttaggaatattattttttttttttttttttttttttttgagacggagtttttttttgttgtttaggttggagtgtagtggcgtgatttcggtttattgtaatttcggtttttcgggttaagtaatttttttgttttagtttttcgagtagttgggattataggcgcgcgttataatgttcggttaatttttgtatttttagtagatacggggttttattatattggtttcgaacgtttgattttatgattcgttcgtttcggttttttaaagtgttgggattataggtttgagttattgcgttcggttagaatattatttttaattgttaattttatatatagaaaatgtgaattataatatattatgtatgtaattttaaggtaatttaacgattaagtgaaagtgttattaattgaattttttgattttttgtgtttttaaaattaaagtaaaaatatttttataaggaaatttttttttataattattaaagagttttaaaatatgttaaaatgtttatttaataaaagtaaaatagagtaagtttaaaaataaaattatttgattagaaacgttagttataaaaatgtttgtattttttttaaatttgttatttatatgttaatatagcgattagttaaatttttaattttttaaaaacgtattttattttaattaaatcgtaatttattaattaatgattttaagagaaatcgtaattattttatttatatataaaaaaggatggtttttaattatagaaattttatttttaaaaagttttgttatgtaagtaaatatattttattttaattttggatttttattttagaaaaaaaaaaagatttaaaatgtataatatgtattttaaaaataaaatatttattaatatttttaattattaagatattagaaaaagtttaattgagtatttgtttagaggaggaggattcgaggtagatgagtttaaaatttttgtatcgtttttatggattagtttttttaaaaaatatataattttaggggtatacggtttaatatttataaaataagtatttgttgaaaattattttcgaatagtttattataaaattaaaaaatagtgttattaatgagaaagtaggtttatttttttttaataaaattgtgtttttgggtttaaaatgttaggttatatacgttgttatttatttttatagagttatgttgttttcgcgtagatatttttatagatttgaaaacgtaaagtggttatattacgttaaacgtttttggtaaggttttgtttattattagtattatagatgtaaatattacgtcgataaaataatcggtgaatgtgatatatagtttttatgtgtttaaatattagtgaaatttgataagtattacgattttaaaaacgtatttttttaattttaatttttaaattgatgttagagtgtttttagtttagatagaaattaatgttagttattagttgttataaagttttttttaattttgtttttatttttttttcggaggaaatttaaatgaaacgtttttttttataataaaataaagagtttgggtaaatgttaaaaatcgttggtatttagtagtggtatagtttgaggatgagtcgtgtatattaagtgggttataaggtattaaagtaaaaattagatcgttgaaaattacggaaatagttgtagttcgttttgatttttcgttggttttaaaatattgtttttaagtagtaattgaaaacgttttataagatgaatacgaattttttttagacgaaaggtagttgggagtaggacgcgtttacgagtttcgatgggaacgcgtttacgtcgtagttgggattcgggagaggttagggggatcgcgtggttttgttgtggaagggattcgcgcgggttcgtcgcgaagggggttttgtttggcgcgatttggggagagtcggggtcggtcgggtggagggcgtacggggatatacggatacgtatagatatagatacgcgtttcgggttgaggagggtggtgggaggatcgtcggtcgtttttcgcgcggagttttagggaattcggattttagtcgtaaagcggagaggcgttagtagtaattagttattttaggggcggcggagtttaagttttttttagtcggatcgtatcgtttaaatttttttcgggttttttttttttacgtatgaggtttttgtatcgaggcggttggttttatcgtagtttcgagttaattcgttaatttcgtaggatattaatcgtttcggtcgtcgtaggttttttcgggattgttttttttagggggtcgttgtttcgttttacgtcgggggtcgttataggacgagttttttagttttagtcgggcgaggcgttagggagtttcgaacgtggtaggatttatttttatttttttagataagggtcgacggttgtgatttggtttttcgtgaagtgatttttggcgatagtagcggagaggattatcgaagtttgtagtcgcggtttgaaaattgtagtcgcgtttggggtatcgtcgttcgttagatttttttttttaggtcgggagagttaatcggaacgggtgcggagggtgggtttgttacgtgacgggaggggcggggtatcgnntcgggggcgcgtgtgcggggcggggtttgtcggtgagagggtgcggcgtttggttggttcgaggcggggcggggaggcgcggcggcgtggcggcgtaggtggggcgtattcgggttgtcgcgagggaggggcggagggggcggcgttgtagagggggcgcgcggggttggaattattgttttgtgtatttttttttatttttagagaggttagttcgagaggtgtgaatattcggagatcggggagaaggaagtcgtaaaattcgttttagttgtttgcgattagttattaaattttagtgtttattaaagatttattttttgattttttttgagagttttttttaggatcggaacgtattttgtaagtggagaatttagtttgttataatttggtagaggtttttcggagtgttaatattagttggggatttatggaatttagattttattgttaacgttcgttgtcgcgaatggtgttttttttgaggtattgattgaaggtagtgtagggagggttttaataggttgaatagtcgattttgtatttatagtgttaaggaaaaagatgaaagtttttagtaatttatttaagatttgttattttttgaagatagtggaaatttttaaagttttgtgtaagatataaatgttttatatagatatataattttagtttatatgtataggatatatatatatttatatatatatgggattagttatgtaatttaggattgtttttagaggatatttacgataattgtagaaaattttttcgtgggaaaggatattgggagtggagtcgtttttttgtttttaaaagatttaatgtttagttagtatataaaggataggtttttttgttttattttagtaagttaagtaaatttttgtgaagttagttgttttttttttttattgtattttttttaagataaaggtatagaatgtattatagtttttttatgaagtttgtttgttgttatttaggttaatttttttttttaggttaataatgttttgtttttaaattttgttaaatggagaatattgtttttatttatttaattttttgttgttaataattgggttgattagagaagtttaaagttaggatgaaaataaaatgttatatattggaattaatttttttggggtataagaattcgtaagtaatgagattgtttttatttttttttttatgagtataggtgttgtattttagaggttttagtattagtattaaaattagtaattttttgggggttataggattatattattatggtggttttggggttgtgtgtttaattttggatttttttaattttaatattttattaattgttagtttttagtaatttttttatatttattttatatttttcgttattaatttagttttagattattttatatttagatatagatttttttttttttggtattattgtaagttagtttttttggttataatatttttgttgtaattagttagttttttagggatattgttatgttttgtatttttttgtttttgttttagttttagtttattattattttttttatttatatttgtttattagtttttgattttaagaaggttattttttttaggaattagaattttgttgatttttattttttgtttttagtttgattatttttgttttatgttttttggtgtagggttgatagtttgtgttttttttatgattttaaatagattgttaatttttgtgtttgatgttagatttgttaattaggatttattatattattttaaggatatttaattatatttatttggttttaggtattgtggtttaagtaataaggaatttttggtgttgaggaggaggtagtatatttgtggttttgtaggaaaatttagaagttaatatatttttttatttattttatttatttaaatttatttattatcgtgttaaagatatatgtttttgtttttatttttttgagtaggaaatttttaggtgatttgatggttattttgtggttattgtttttgattatatagtttattaagttgattatttttgaatgatatatttcgattagggatggcggttgttatgggtttagttgtgtttttttttagtttatacgttgaaattttaatttttaggaatttagagtatgatcgtatgtggagatagggtttttaaagaggtaattaaggtaaaatgagataatatgagtggtttttgatttaagatgattggtgttttgataagaagaaattaggatatatataatattgattaagggattattttgtgaggatataataagaaggtggttatttgtaaagtaagtagagaggttttagaagaaataagatttgttgatattttgattaatagtttttagtttttagaattgtttgttgtttaagttgttcgttttgtggtatttgttatggtagtttaagtaaataaatatagtggtttttttggattattttaggttagtaattatatattgattgggagcgatgatcgtttttagttattgtttattatatgtggttagggaaggtgatttttttcggtaatggtacgatatttattatattttgtttagggaagggattttttttagttatattaagttagttatcgtatattgattatataatgattaaggaaagtgatttttatcgattttatgtttattttttgtagatgtagaaaaggagggttttgtatagagtagaaggttttaaatttaaaatttttgttattgatatattttttttttgaagaatttatgtggaaaaggtaaaataagttttattatttgtttagaattgaatatattagaaatttgtggttaggttaaaggtagttagacgtaggtaaggttaatagtttttgaaggggcgtggtttaattttttatttaataggggtgtttattgaatggagataggtttttttaaatagattttttttttggaggtaggaatagtgagtgtatttagatggagatgtcgtagtgtatttatttatggtgtttatagtatattgtaattttgaaagtattgagaattagagagattttaagagattttatattttttgatttttttgaaatattattagtaaagttaattggggttagttttgtttgatgagagtaataatttagattggtataagtgttttttttaaagggtgatatagtttttttttttaaaatatttatgattaattagggttaatatgttaatttaattatttattgtagtttatagagtataatttgttttgtaaaagttgtttaaaagaaatgttacgtatattggtaaatgttttattagttatattttaaaaagtaaatatagataaaattaattttaataatttattttatttaatttaatatttttaaaatattgttattttaatatgtaattaataaaaattattgagatattttatttttttttttaatattgttttaaatttagtattttatatttatagtatgttttaatttagatgttaaatttttatcggaaatatttgatttgtatttagattttataaaatttattgttgtaaaaagtagatttatatttttaagttgttttgaataaattaaagttttttacgttaggtgtggtggtttatatttgtaattttagtattttgggaggttaaggcgggtagatgatttgagattaggagtttaagattagtttggttaatatggtgaaatttcgtttttattaaaaatataaaaattagttaggtatggtggtaggtttttgtgattttagtaatttagtaggttgaggtaggagaattatttgaacgtaggaggtagaggttgtagttagtcgagattgtgtattattgtattttagtttgggcgataaagcgagattttgttttaaaaataaataaagttttttaataattaaatatagtattagttttttaatataaatttaatgataatgaaataaaatagaaaattttgttatgttagttatattttaagtgttttatggttatatgtggttattaagttaggtagtgtaggtttgaagggttagaaacgtgttttttaattgtgtttaaatttttagtgttagagataattagagtagtttggagttagaaaaatttttgtagtttagtaatttaatttttttgttttagaagggaagaaatttatagtgagagaagttgagggatttgtaaaagattatatatttaaattcggtggtatatatttgaataataatttaggttttttgatttttaattttaagatattatttaagtttttttatattagatatattttagaataaagtaatttttaaatttatttgaattattatttcgatgatataggtaagagaaagtaaatttgtattttaattgtatttttataatttgataagagtatattttataatatttaaggtattttttttttattttgttttagggtttatgtggttttatttgttagtttttttattttaatgtattattgttttttttttttggagttatttggtcgaatatcgttgtcgttcgtttatagagtattcggttatatttttttgtttgtagttttttttttttaggtgtttattatacgttatttaaggttgtgttttagagaattttttatatttgtaaattaaaatatttagtagaaattatagtaaagttgtagaagagttgttatgttttagttataaatatattaggttttaaagttttatttcgtgagaagttgtgagagagaaagagaagatatatgtgtggttaagtgtgtgatattaggtagttttgttt

SEQ ID NO: 65 - DNA, 8770 bp, Artificial Sequence
  chemically treated genomic DNA (Homo sapiens)
ttagtttagaggaattataaaattttaagaagttttcgaattaaatatgaatggtgatagtgaagaagaaagagaaatgttattatattaataaatataggttaagtgagtaaaggaagaaacgtgtgtatattttttataataaggttgttttttttttaattttgttattaaatttatagtgtgttttataaatatggatttttagaattatagaaatattatagttttttttttagtttgttaaagtgtttggaatttttattattaagttttaggaagttttgtaagaatattttattaagaaatataatatagtaatatattataatttgtttgaaaaatgagtatgatttattttattagttagtttcgggaaataggtttttgaaagaatggaagttttttaaattttttttttatggagatggttggtagttaaaggagtaggattatagagattttaaattagattgaagggattgagggataaatgagaaaggggaatgttaaggtaaatttttataatggtttgtattattttaagtaataggaattaatttattttagaaatatcgggtttattgttaaaattaatattgtttttagttcgtttttaataatatttattttggggttttttaatattttatttggttattaatagtagtttttatagaaatataaatgaaattaagaattgaatatttatatttatgatgtaaaataaaattatttttttaagtgttttagttaagtgttgataggaaataaaatagaatttatagggatagtggattttttgataagtttgagatgttagtatcgtacgtttttaggtaaagtgtaatagaaggaattgtatttgttattatattaattgttttttttttagtggagggtttttgattttggtattatgatttattgggttattaaggattttagttgtttttttattatggtgggttttgggtttttttatttagtttagataatatatgtaaaggatttgaggtttttagataagaagtaatatttagtagaatttggtatttataggatgatgaaatttatgatattattattttagtttttacggttataatttatagaaagtttttttttatttttagaattagtttttgtagtggttttgaatgtgtaaacgttattttttagtaatgtttgaggtagaatttgaaaatttgaaatatgatttaaagttattttataataattaagttgttatagttatttaaggttgttttttaatatgttttttatgaatttgtttttttaatagagtatagtgtagggaaaaggggagggggtaattgtataaaagatataaaaggtttagttttagtttggtttatgattgttatgttttggaattttgtatagttttagaaagagagtgttattgattattaaaaatatataatttttttttttttatttttttaatttttagaaatatgggttttattatgttgtttaggatagatttaaattttcggatttaaaggattttttttttttagtttttcgagtagttgggattgtagacgtatgttaattaataattaataattaggggttaggcgcggtggtttacgtttgtaattttagtattttgggaggttaaggcgggtggattacgaggttaggagaatcgagattattttggttaatacggcgaaatttcgtttttattaaaaatataaaaaattagtcgggcgtagtggcgggcgtttgtagttttagttattcgggaggttgaggtaggagaatggcgtgaattcgggaggcggagtttgtagtgagtcgagatcgcgttattgtattttagtttgggtgatagagtaagacgacgttttaaaaaaaaaaaaaaaaaaaaaagaattaataattaattaattgttgttgatttttgattaagaaaggtttatgaaatatgtttgagtttagtagggtttttttttatttgttatacgtggtgtttttttttattaggttttttttgttttttttatttgggtaagtatattttttttattgtatggtatagggatataggttgtaagtatagttttacgggaatcgtttaattttaagaggttatgtgtgtttattttatatagtttatgatttataaattttagtattggtgttaaaatggtacgtaatttaggaattttttaaaaatattttatataattagaattttttttttatttaataaggagatatatttttttttttaagtgtttattaaatgttaataaatatttttttttttaaagagttttgtttattttgataaggtttatagtttaaattaaattttttttaaggttttttagtattttatatttttttggttttaatttatttaataaatttttttaaattgtatttttttttttttttataagaaggtattttatttatattttttttttttttttttttttttttttttgatttattaagaaaattgttattggttttgtttatgtgttatataatagaaggggaaaaggtaagggtatagtttaatatagcgttgatttagaaggtggaaaggatagtaaagatcgtttggtggtgggagtggtaatttataagtttagtagtagaattatggaaagtggagttcgaatataatttagggttatagattatttttgtatttgattgttattattttgttataaattttggtaggtaagatgataaagtagttatattaggatagttggtagtggtaggtatgaacgtggttttttaggtttgttatttttttttattgtatttttagtttatgatattagatagtaagatatgagttagataggggtagtggaagttgtaggaggattgaagttatggagttagagatgagaggaaataggttaattttgtttataaaggagtattagtaggagagtggtgtgaggattaatattttatgtagggttttttagatatatgatttttttttgttagtttaattgaaatttaggaggttttttgaaggtgaaattaagatttttttatttttgaagtcgtattttgtttaaggttcgtgtttggttgttttgagaggttgggagataggatattaaaagagtatttgttttataggattttttttgagaggaatggtttagtaagattggttattatgggttttggagtaatataggtttaatgttattggcgattttgttttttttggttgtggaaattgggtaaatgttttaagttttttaatttttatataaaaagtatatataagtatatagtaagtatttgataaatgttattttagattttgttatttttgttagttttggattttagtaaggtttatttataatggatagttgattatttattgtttgaatgttgatagtatatttgtgaataagaagagaggataaataataagaggtttggaattggaagaaattttagttatcggttttaaaagacgaggattagtttttagagaggttattagtgatattttgttttaaatttttttttgttaaaaaagtgttattttttatttagtttttatttttatttttgtaagtttttattggcgagaggaggatatttttttaattaaaaatttgtgatatatggtttgataagtatttttaaatgtaattaaggggattatagtatagaatatttttattcggttttagtttagttaatttagtaaatgatttaaagggtttcgtgtttagagggtagtaagatagtaaaaacgttttaagatttttttttgtatagtatttgtatttttattgtttagggggttgtatttatttttatatgatttattttttttgtgtaacgtatgggggtagggagggaagcgttagtattattagttattagtattttggggtgaattgattattaggataattaaaaatatatttaataaagttttggagatatatggtaagtatcgtgatggattagaagcgatttttaagttgaaatgttgttttgaatgtaatgttagttggatgtttggtgagtagaaatagataaggggaaatggagtaagcgcggtataggggtgagtgttgttttgatttttaagtttatttaagattggggttacggggtcgggtgttttttgggatttacgttttatgtagtttggggtttagagttggtaggaataatggagatggggattaaaggttgttatcgttgttttttttcgaaatgttcgttcgggttttgtttggggttttcgtttacgcgtttattacgtgtatagtttaaattttttagagtcggttcgaggtttgcgggttcgggcgttagggtggtttttagggtttttttttttttttattttttttttttttttttatagttgatgattttttgtagaaaaataattgcgaaaaagaatttattttatttttagtttttattatcgcgatttttatatggatgtgacgtgattttagttttcgaaatgtttaggtgatttacgcggggatatttcggggcggggcgagggagttttttcgggcgtttgtagggatcgggcggggcggggtagcggggcggggtagggaaagggggcggggcggggttcgtaggttcggtcgggcggaggtcgcgcgcgtttttcgttttttgcgttttttggcggtcggttggacgtatttcgtagttcgatttagagagagttacgtgattttggaaagtttcgtggaaattttcgggtttataattcgtatataattgaaacggggtaaagtagattgcgtagtttgtagttttcgtggcgggttaagcgagtttggagttcgcgggggcggagcggtgagagcggtcgttaagagagattatatttttagtcgattttgttagcgagcgagttcgattttaggcgtttatggagcgtcgttttcgttcggtttttgtttcgattttcgtttgcggcgcgtttttgttttgattaggatttgggattttgcgaaaggatcgcggggttcggagaggtaatcgtcgcgtttttcggagaggtaattcgtcgcgtttttcggagaggtaatcgtcgcgttttttcgtgtcgtttgtatcgggtttatcgtagttaagggatgcgggtgtatgttgggtagcgatttttcgggttggtattatatatatggcgttggttttgtagcgattatggaatgggagtatgatggacgaatatgtatgggaatatgaagtgatgggagatgaggttattgatgtagaggatggagatgatagttatggagatatttagttagttgttttttttagataatgtacggaatttaagttgtagttgattggtgaagaggcgtttttcgggtttttcgatcgggtggtcgttggcgttttgtttttttcgtgttttttttggagttaagcgttgtatgtttatggttacgtagattttgtagaagcgttgcggtttttttttaaattgtgtaggattagttcgacggggcgtagggtatcgtagtggtcgttagttcggcggaggtggggggttttagttttagagatagttttttagacgtttacgggtttttgtagggggttggggttttggcgcggggtttagtttttttagtagtagtagtgtaagagaagtatgtatgtagacgtgggtcgttggtttttgttttagtttttattttacggttagattgtttttgttagttggagtcgttttatattttgttatttggttttttagaaaagtagtggtattaagtaaggaaggagtttaattttttttgagttcgttttgtttttcggttttttcgttttagatttttttgttttggaaagttagtttgggttagtgtttttatggtagttttttggtagaattattggttattaaagggatttttggatcgtaattttaatgtattagattattgagtagttaatgaatgttttatttttattgtttaaggtgttgttttgattttttttttaattttttgtattatttttgattttttggagaggtatatttttaaatttggatgaggtatttgttgataaataatttattaatttttataatgtagataaaaatgtttgtttagagtggaaaaataaaataagggggagaagagtttgagtaacggagaagttttgtggaattttagtgataaaagttgagaaattatttttaaataagatagtgaggtaataaatgttaaaaaaaaaaaaagttaagggtaatagtgtattgtttgttatttataatgtatttgaaatatttgttttttaattttaagcgtagagtggtttaagatttggaaatttgggtagtgggttttgatttttaaggaggtagttttataggttgtgtaaggttaattttattaatgagattatattggcgtattcgatattgatatttgtatgttttgtttatggtttatagtttttattattttagatttttggtgaaaaatttttagatttagaagagaaaaataagagttaggtaagtaaaaagagataatattttatttgtttaaaatttttttattgtttatttttttttatttgattgtggtaggtattgtagttataggtttggtgttgtgggattgtaaggggtaggtattgaaagatttggtttttaggtaaaattttgtttttgaatggttgtgggatttgagtagtatttgtaattttattgttttagttgtagattaaggtggtagtgtaattttagggaagggaataaggttatttttgatttttagttttattattaagtatggtgattggtttttagtaggtggttaggtagtgtttgttgggtggatgggtggatggatggatagatggatggatggatggatggatggatggatggatggatggacggacggacggacggatagatgatattgtgaaagagatttttgttgtgttataaaggaaaggtatatgtgttatttttattttgttatgattttgtttaattttatttgtagaggacgtttgatattaaaagagagtattatttgatttagagaatgatttttattatgttttttttagtaattagattaagaattttaatttaaaattattattagaaaatttttgaggagaaattatgggttatttagtttaattttttttttttgagtgggttataagaattattttaatattttattaatggtgttgagagtttagatttatatagaagtagttattttaaaatttaggttttttttttttttttttttataggtttaatatttttattaattggaaagttgttttggtaaataagatgttgtaggaatggaattaataattattgtgaaattttttagggaatgtttttgtgttttgaaaatttttttatttttttggaaattaggaagtgtggttagatattttattaagggttagtaaattatagttggttttttatagtgttttatattggagagattttatattatgttaatttgtattattttgcgttgttggtatgggttgtagatgttggtttttgttatttttttttttttatttgttagagtggttttttggtggaaatttttttttttgtttatttttagatttttattttttttattagttgattatgtttaaagattttagggtgaaaagttaggtagatttgtttttgtgttggtatttggagggtgatgataaaattttattggtagttgagttaaaatgattgagttttaatatttgtttttagaagtatagaatttattgttttattattattttgcggttttttattttttgttttcgtagagatttaggttttatcgtgttgtttaggttagttttaaatttttgagtttaagtgatttttttttttcgattttttaaagtgttaggattaaaggtatgagttattatgtttagtttattgttagtttgttttttattttgatatgaagttcggtgcggaggttttgaaggaatgttgattgtttttaaaattgtaaagtattttgttggaaatggatttttttattgattagaaaatattcggttttaattttttataaatattagaataaattttatgattaaatattttataaatatttttttttggggttaaagaggaaatattaattagtagtttaagtgatagtataaaattgtaagattttttataaagtattttattgtttttttagtatagggagggagtgataatttaagagtttgtttaagagtaggagtgtttggtggtggtttgaggggaggagttatagatttgttagggttattttgagtttttaattggtatttagtattttttaaatttagtgttgtttagggtggttttagaatgaaacgggagtttaagttggttttgaggagtagtatttgttgttgatagatagggttggttttttgataaatattattgaaaatacgggttattttttttttttttagtatttattttttgtttttttttttttgtttaggttaattttttaaagtgatgtaatttaaaatagtttagtgtgagttaatttttggggttagttagtatttcgggagtagaggtgttaagattttttgtttatagattagggtaatgataagattaaatattggggttttttgtaggtagttatagaggagtcgtattaaagttaggttaatagaatggttttttttttttttttttttttttagg

SEQ ID NO: 66 - DNA, 8770 bp, Artificial Sequence
  chemically treated genomic DNA (Homo sapiens)
tttgaaaaggaaaggaaaaaaaaaaagttattttattagtttgattttaatacgatttttttatagttgtttgtaggaaattttagtgtttgattttgttattattttgatttgtaggtaaaagattttagtatttttattttcgggatattagttggttttagagattaatttatattggattgttttaagttatattattttaaaagattagtttaaataagagaaggaaggtagagagtgggtattgaggaggaggggaataattcgtgtttttagtaatgtttgttagggagttaattttgtttgttagtaataggtattgttttttaaaattaatttaagttttcgttttattttgaggttattttgaatagtattggatttggggagtattggatgttagttaagggtttaaagtagttttgataagtttgtagtttttttttttagattattattaagtatttttgtttttgggtaaatttttgagttattattttttttttatgttggaaggatagtaaaatattttatgaaaaattttgtaattttatgttgttatttaggttgttggttggtgttttttttttagttttaaagagaagtatttataaagtgtttaattatgaagtttattttgatgtttataaagagttaaaatcgaatgttttttaattaataaaaaagtttatttttagtaagatgttttgtaattttaagagtagttagtatttttttagaattttcgtatcggattttatattagaataagaaatagattaataataggttaggtatggtggtttatgtttttaattttggtattttgggaggtcgagggaggaggattatttaagtttaggagtttgagattagtttgggtaatacggtgagatttaggtttttacgaaaataaaaaatgaaaaatcgtaaaataataatagaataataaattttatatttttaagaatagatattggagtttaattattttaatttaattgttaatgaaattttattattattttttaggtattaatatagaggtaagtttgtttggttttttattttgaaatttttaagtataattaattagtagaaggaatgaaaatttagaagtagataaggaaagaagtttttattaggaggttattttggtaaatgaaggaggaaaggtggtaaagattagtatttataatttatgttaatagcgtaggatgatgtaaattaatatgatgtaggatttttttagtgtggaatattgtaaaaagttagttgtgatttattagtttttagtagggtgtttggttatattttttaatttttaagaagatgaagaagtttttagagtataaagatattttttaggaaattttatagtgattgttaattttatttttgtaatattttatttgttagggtaattttttagttaataaaaatgttaaatttatggaagagggaggagaagaaatttagattttagggtagttatttttgtgtgggtttagatttttaatattattgataaggtgttgagataatttttgtggtttatttaaaggagagaggttggattagatgatttatggtttttttttaggagttttttggtgatagttttagattgggatttttaatttgattgttgggaaaggtatagtgggagttattttttggattagatggtgtttttttttgatgttagacgttttttataggtggaattgggtaaaattatagtaggataaaaataatatatatattttttttttgtggtatagtaaaagttttttttataatattatttattcgttcgttcgttcgtttatttatttatttatttatttatttatttatttatttatttatttatttatttatttatttatttaataagtattatttgattatttattgaaggttaattattatgtttgatgatgggattaaaagttaaagatgattttatttttttttttgaaattatattattattttagtttgtagttaaggtaatggagttataggtattgtttagattttatagttatttaggggtaaagttttgtttaggagttaggttttttaatatttgttttttgtaattttataatattaaatttgtggttatagtgtttgttataattagatggaaagagatgggtagtaggaagattttaaataaatgaggtgttatttttttttgtttgtttgatttttattttttttttttgaatttaaagattttttattaaagatttaaaatagtgagagttgtaaattataggtaagatatgtaaatgttaatatcggatacgttagtgtgattttattggtagggttagttttgtatagtttgtaaaattgtttttttagaaattaaaatttattgtttagatttttaggttttggattattttacgtttaagattaaagaataaatgttttagatatattataagtggtaaataatgtattattatttttaattttttttttttttaatatttgttattttattgttttatttaaaggtagttttttaatttttgttattaggattttatagaattttttcgttatttaaattttttttttttttgttttatttttttattttgggtagatatttttgtttgtattgtggaaattgatgaattatttattaataaatattttatttaaatttggggatgtgtttttttaaaaaattaaaaatagtataaagaattgaaaaaaaaattaaagtagtattttaaataatgagaatgaagtatttattggttgtttaataatttggtatattaaggttgcggtttagaagtttttttaataattaatggttttgttaaaaggttattataagaatattgatttagattggttttttaaggtaagaagatttgaggcgaggagatcgaaaaataaagcgggtttaaaaagagttaagttttttttttatttaatgttattgtttttttgagaggttaggtggtaggatgtgggacgattttagttgataaagatagtttaatcgtggggtaggggttggagtaggggttagcgatttacgtttatatgtatattttttttatattgttgttattggaaaagttgaatttcgcgttaggattttagttttttgtaaggattcgtgagcgtttgggaagttgtttttgggattgaagttttttattttcgtcgggttggcggttattgcggtattttacgtttcgtcgggttggttttgtataatttgggaaaaagtcgtagcgtttttgtaaggtttacgtggttatgagtatgtaacgtttggttttaaaaaagatacgaaaggagtaaagcgttaacgattattcgatcggagggttcgaggggcgtttttttattagttagttgtagtttaagtttcgtgtattatttgaaaggaatagttggttggatgtttttatggttgttatttttattttttgtattagtgattttattttttattattttatatttttatatatattcgtttattatatttttattttatgatcgttgtaaaattaacgttatgtatatagtgttagttcggggggtcgttgtttaatatgtattcgtattttttgattgcggtgagttcgatgtagacggtacggggaggcgcggcggttattttttcgggaggcgcggcgggttattttttcgggaggcgcggcggttattttttcgggtttcgcgattttttcgtaaagttttaagttttggttaaggtaggagcgcgtcgtaggcgggggtcggggtagggatcgggcggaggcgacgttttatggacgtttggggtcgggttcgttcgttggtagggtcggttgggggtgtgattttttttggcggtcgtttttatcgtttcgttttcgcgggttttaagttcgtttggttcgttacgaagattgtagattgcgtagtttgttttgtttcgttttagttgtatgcgggttgtaggttcggggatttttacgggattttttaaagttacgtgattttttttgggtcgggttgcgaagtgcgtttagtcggtcgttagagggcgtagggggcgaggggcgcgcgcggttttcgttcgatcgggtttgcgggtttcgtttcgttttttttttttgtttcgtttcgttgtttcgtttcgttcggtttttgtaggcgttcggagaaattttttcgtttcgtttcggggtgttttcgcgtgagttatttgggtatttcggaagttggggttacgttatatttatgtggaaatcgcggtgatgggaattggaaatgaaataggttttttttcgtagttgtttttttgtagaaaattattaattgtggagaagaagaagggaaataagaaagaaagaaaattttaaaaattattttggcgttcgggttcgtaggtttcgggtcggttttgaaaagtttgggttgtgtacgtgatgagcgcgtaggcgggagttttagataggattcgggcgggtatttcgagaaaaagtagcggtgatagtttttggtttttatttttattgtttttgttagttttggattttaggttgtatgagacgtaggttttaggggatattcgatttcgtggttttagttttaggtaaatttaggaattagaataatatttatttttatgtcgcgtttgttttatttttttttgtttatttttgtttattaagtatttagttgatattgtatttaaagtagtattttagtttagaaatcgtttttagtttattacggtgtttgttatgtgtttttaaggttttattaggtgtgtttttagttgttttgataattagtttattttagggtgttgatggttgataatattggcgtttttttttttatttttatgcgttgtatagggagggtgagttatgtggagatggatgtagttttttgggtagtgggggtgtaggtgttgtgtagggaggagttttagggcgtttttattgttttattgttttttaagtacgggattttttggattatttattagattggttaaattagaatcggatggaaatattttgtattatggtttttttaattatatttaagaatatttgttaggttatatattataggtttttaattagaaaagtatttttttttcgttagtaaggatttgtagagatgggggtgggggttggatggagggtggtatttttttggtaaaaagaagtttggagtagagtgttattagtggtttttttgaagattggttttcgttttttaaaatcgatggttggaattttttttagttttaaattttttgttatttgttttttttttttgtttataaatgtgttattaatatttaaataatggatagttagttatttattgtaaatggattttgttggagtttagggttagtagaaatgatagggtttaaaatgatatttattaagtatttgttatatgtttatatatgttttttatatgaaggttaagaagtttgaggtatttgtttagtttttataattaaaaggggtagagtcgttagtggtattaagtttgtgttattttaaagtttataatgattagttttattagattattttttttaggaaagattttgtgagataggtatttttttggtgttttgttttttagttttttaaaatagttaaatacggattttagatagaatgcggttttagaggtagaagggttttggttttatttttaggaaattttttgggttttagttgagttggtagaagaagattatgtatttgaaagattttgtatggaatgttaatttttatattatttttttgttggtgtttttttgtaaatagagttggtttgtttttttttatttttggttttatgattttaatttttttgtagtttttattgtttttatttggtttatgttttgttgtttggtgttatgaattgggagtgtagtaaagaggagtgataagtttgaggggttacgtttatatttgttattgttaattgttttgatgtaattgttttgttattttgtttgttaggatttgtgataaggtaatagtagttagatgtaggagtggtttatagttttggattatgttcgaattttattttttatgattttattgttgggtttgtgaattgttatttttattattaggcggtttttattgttttttttattttttaaattagcgttgtgttgggttgtatttttgttttttttttttttattatgtaatatatggataagattaatgataatttttttggtgaattagaaggaaagaaaagaagagaaggagagagtatagatggaatgtttttttatgaaaaaaaggagaaatataatttggggagatttgttgaataagttgaaattaaagagatatagaatgttgaaaagttttgaaggagatttaatttgagttataggttttgttaagatggatagaattttttaaagaagagaatatttattaatatttagtagatatttaggagaaaaaatatgtttttttattagatgaaaaaggaattttgattatgtgaaatatttttggagagtttttaagttacgtgttattttgatattaatgttggggtttatgggttatgaattatgtaaaatgagtatatatgattttttggaattaaacggttttcgtgagattgtgtttgtagtttgtatttttgtattatgtagtaaaaaagatgtgtttgtttagatggggggagtaggaagaatttgatgaaagagagtattacgtgtgataagtgagaggagattttgttgagtttaaatatattttatgagttttttttaattaagaattagtaatagttgattggttgttgatttttttttttttttttttttttttgagacgtcgttttgttttgttatttaggttggagtgtagtggcgcgatttcggtttattgtaagtttcgtttttcgggtttacgttatttttttgttttagtttttcgagtagttgggattataggcgttcgttattacgttcggttaattttttgtatttttagtagagacggggtttcgtcgtgttagttaggatggtttcgatttttttgatttcgtgatttattcgttttggttttttaaagtgttgggattataggcgtgagttatcgcgtttggtttttggttgttgattgttaattagtatgcgtttgtagttttagttattcgggaggttgagagggaagggttttttgagttcgggagtttgagtttattttgggtaatatagtaagatttatgtttttaaaaattaaaaaaataaaaaagaagaaattatgtatttttaataattagtgatattttttttttgagattgtatagaattttagggtatggtagttatgggttaaattaaaattggattttttgtgttttttgtataattgttttttttttttttttttgtattgtgttttattggaaaggtagatttatagaaaatatattgggaagtagttttaggtaattatggtagtttagttattgtagggtagttttgaattatgttttagatttttaaattttgttttaaatattattaaagggtaacgtttgtatatttaaggttattataagggttagttttgagaataaagagaagttttttgtggattataatcgtgagaattgggataatgatgttataaattttattattttatgaatgttaaattttattgaatgttgttttttatttagggattttagattttttatatgtgttatttggattgaatggagaaatttaagatttattatggtggagggataattgaagtttttagtgatttagtgagttatagtattaggattaaagattttttattgggaaggaggtagttggtgtaatgataagtatagttttttttgttgtattttgtttgaaagcgtgcgatgttgatattttaaatttgttagaaaatttattatttttgtgaattttgttttattttttgttaatatttggttgaaatatttgggaaagtaattttattttatattataaatataaatatttaatttttaattttatttatgtttttgtgaaggttgttattaatgattaaataggatgttagaaagttttagaatgggtgttattaggaacgagttagaagtagtgttggttttagtagtaagttcggtgtttttgagataaattagtttttgttatttggaatagtgtaagttattgtgaaaatttgttttgatattttttttttttatttgttttttaatttttttagtttagtttggggtttttataattttgtttttttggttgttagttatttttataaaaaaagaatttgaaaggtttttatttttttagagatttgtttttcgggattggttggtaagataaattatgtttattttttaaatagattgtgatgtgttattgtgttatattttttgataaaatgtttttatagaattttttagagtttaatggtggaaattttaagtattttagtaggttggagaaagagttgtggtatttttatgattttgagagtttatgtttgtaagatatattatggatttaataataagattgggaggggaataattttattgtaggaaatgtatatacgtttttttttttatttatttagtttatgtttattgatgtgatgatattttttttttttttttattgttattatttatgtttgattcgaaggttttttggagttttatgatttttttgagttga

SEQ ID NO: 67 - DNA, 6264 bp, Artificial Sequence
  chemically treated genomic DNA (Homo sapiens)
gggtaatatagtgagatattatttttataaaatatttaaaaattagttaggtatggtgatgtatgtttgtaattatagttatttgggaggttgaggtgggaggatggtttgattttagtagtttgaggttatagtgagttataattatgttattgtattttaattttagtaatagtgtaagattttgttttttaaaaaaaaaaaaagatatttaggtatttaggtaggaatttgaaaggcgaataaaagtttattatatagggtaaggtggagggaggggaaggtttttaaagtagagggaaaagtataaatggatgtaaagaggtttgatatataagtttttgttttattttttttttagattattgttaatttgaggggaatgtaggagataattgaataaattcgtaggttaaggaaattgtaaaaatggagtatttttggttttaagagggaggataattggtggaatattaaatgattttatatgatttgggtattggttatattttttattttttttattatttttttttttgtttattttgttttgggtatattgatttttttgttatgtttttgagatgttaagtataaggttgttttaagttttttgtttttgttgtttttattgtttagagtttgattttttttttttttttattttttagaggttttttttggttagtttatttaaaataggtgttatttttttagatttatttagttgttatttttttcgtagtatttattattattttatttatgtgtttgttatttagttttttttaattagaatataagttttatgaaggtaagttttttttttgttatttttaaagtttagaatagggtttggtaaaatatagttatacgagtattagtaaaagagataaataaaaggagtggggagagggtagagaagaatttagatgagttggaggtgaagggaataggtattgtaggagtgtaattttaatagtttttgttttattggttgagtaagatgggaatttattttttgagaggagagagggatttaaagtttgggatatttgtggaagatgagaacgagtaatatagggagaaagttgggaatttaaatatttgaatttaaattaaatagataattaattgtattgtgttaaggggtggggtgagagttaaaagagaagatagttttttttcgtttagaatgtggtattttgatttattttttttggagttgagtagagaattatagggtggggagaattaaatagaggtttttgaaagaataagtaggtgagggtgggagcggagagaaattgaaatttggtagaaaataatttttttgagagttatgtttgagtggtatagaatttgagagaatgaaattaaagtatagataagggttttttggttttacgtttttatgattaaaaaaaaaaaagtttttaatatatttgttatttggtagttgggaatttttaattggttagaagtgagttttaggatatattgttaattgttgtttttttttttttttttttttttgggtagggtatttgtgtaaatagatagtaacgaaatagaattggattgttttattttaatttttttttttttgtttttatttttattgtaattattttattaataagttagggttgttagtatttatattaagtataatttattattgtgtataattagttttagggtggtaatgagatacggttttttggtgagaattggaaggttagtgattaatatttagaattttttttttggatgattgtggattataatatttttagttgttttggggatttttttgtttgtaaaaaaataaaaaaaaattttagtggaatatgaagtaggttttttggtgtaaaatagtttttttatgaattgtagtttattaaaaagaattgttgttttttagaattattatttaatttaggaatttcgttattgagtgtatatttagaggaatataaattattttattataaagatatatgtatgtgaatgtttattgtagtattatttataatagtaaagatattgagttaatttaaatatttattaataatagattggataaagaaaatgtgttatatatatattatggaatattatgtagttataaaaaatattaagattatgttttttgtgggaatatgaatggaagtggaggttattatttttagtaagttaacgtaggaatagaaaatttaatattgtatgtttttatttagaagagggagttaaatgatgagaatttatgaatgtaaagaagggaataatagatagtagggtttatttgagggtggagggtgagcggaaggagtggagtagaaaagataattattgggtattgggttttatatttgggtgatgaaataatttgtataataaatttttgtgatacgagtttgtttatgtaataaatttgtatatgtagttttaaatttaaaagttaaaagaaaaaagaattattgttttttataaacgtgttaaattttagtattagggttttttttattattaagattttgaaagttaatatgtttttaattgatttttttttttttgtaatttggtttatttatggttttttttattttggtttgtggtaatttttattttttgggataaaaatttgggttttttttttttatattttatatttaatttgttaggaaattttgtgggtttggatttgaaaatatatttaaaatttgattattatttgttatagacgttgttatcgtttttgagtaagttatttttattttttgtttggtttattataagagttttttattgttttttgttgatttttagttttttatagtagtttttaaaatatgttagttgatattatttttttgtttaaaatttttttataattttttattttatttagagtaaaggtaaagtttttagaatagtttataaggttttttttgtttggttttttatattattttattttattttttattattttttttttatcgtttgttttagttattttagtttttttgatggttttagaatttgttaggtaggtttttatattaggttttagcgttggttgttttttttgtttggaaatttttttttatatttgtggagtttatatttttattttttttaagattgtgtttatatatcgtttttttagtgaggtttattttgattattatatttaaagttgtatttgtatattttattttttttttttattttattttattttttttataataattatatttgttttttgaattttttgtttattgatgtatttttaggatttagaagaatatttattaagtggtaggtatttaataaatatttattgaatgagggatgaatttattttgtttaatttagtataatttttttaagaaaataagattataaattagattttttgagaacgttaaatttttttttttttttttagatggagttttattttcgttgtttaggttgaagtgtagtggggtgatttttgtttattgtaattttcgttttttaggtttaagagatttttttgttttagtttttcgagtagttggtattataggtatgcgttattatgttcggttaatttttatatttttagtagagataagggttttattacgtggttaggttggtttcgaatttttgattttaggtgatttgttcgtttcggttttttaaagtgttgggattataggcgtgagttattgcgttcgggcgagaacgttaaattttagttgaattaatcgtaatttagtatttttagatatagtatttgggatggtgtaatagggagttcgatggagattttggtaagggatatggtgggttaagaaagaattgtttgtttttgatattagataaatttaggggatttattttattttaggttttagaattatgtataaaggtagagaaaagtgattttgagtgaatttgtattgataatttattagaataaagttttttggagttagggttttcgtagtatgtgtttttttggaaggtggaataaaagtttgaattcgttttgttattttttggaaggtagttttgttatttttttaggttttggtttttttttttggaaaaggatggtatttatcggtttttcgtatcggaggttgtttgtagggtgtttttagtattttttagggaagttttttagaatgttgtttgatatatttttataaaatttatttttattgtggtaaaatatatataatataaaagttatttttttatttagtttgcggtgtacgtttgttaattttatagtaagtaatatatgagttttaaattagaatttggataacggtaaatgagatgaaaggcgaataattcgaaagtcggattattgaggagttttgggaacgcgtcgcgagttgaagttatacggggaattttattttgtcgggatagggtcggttttggtcgtttttagggagtcgggtagttttcgcggcgtggttcgggttttttttgaagttcgttcgttttttttcgtttggtttagcggcgcggtcgtcggaggattttgtttacgcgtttaacgtcgggcgttttgttttgaaggtaaagggttttttgtttcgtacgattcggagtcgtcgaggaggtgacggcggtagttttggggcggttcggtgttatttattattattttgtttttttgaggcgcggttttttaattgtttcggtttcgttaggaggcgcgcgttttagtcgtttcgtcgcgcggtttcgatcgtattttagttcggggcgaagaaagaaaaggcggtcggttttcgtcgtttttcgtttatttagtcgggttcgcgtaggcgcgcgtagttttcgttttcgcggtcgttttttttttaggtcgtcgggcgcgtcgcgggcggggtcggcgcggggggcgggagtcggtacgggttcggttggggttcgattcgggattagttggtttcggagcggaggagggagtttcgatcgttacgagcgtcgaagagataaagtcgcgttagggggttcggtcggggcgggggagttcggggtttgttggtgttttagttcgcgcggagggtttttcggattcgcgcgtcgtcgttgtcgtcgtcgtcgtttcgtaataggttcgggcggtttcgtttttcgtttttttttttcgtattcgcgatttttcggggtattttagttcggtcggggtcgtagtttggttattcgtttttatgcggttcgggtttaagatgatgtcggtaagtgggcgagcggttagggcgtcgggttcggaagtgtgcggggtcgcgtgtcgggggttggttcgcgttttcgggcgcgtcggggaaggagtttgggggtcgtagttcgcgcggaggggtcggggtttttcgagtttcgagcgggttttaggaaggggaggttttattttttgggttttgcgtttatagtcgtcgtgggggcgcggcgagattttaatttcgaggcgggtttttttagttgtttcggagttaggcgagtcgttcgcgagtttagtagttatttaaatttttcgttttttattgggttttgatttttttgtagtttttgaaggttaagaatacgggaatcggggattttgttttttgttgtgtttttttattttttattggagtgaaatatacgttattggaacgggtatttttgttttgtttttaattgaatttcgattttgatatttatagtagtagttaagttatttttatttttttgtggaaaggggttttggtaaatgtaatttcggaagttttagattgtaggaaagcgtacgtgtttggtttttttcgttttttatagtttttagtaagattttcggagaggattagtgttttttttaggagtttcgtaggtttttgatacggttattaggttatagatgaatagtaggtttgagatattttagaaatgtttttgttatttagcgatcgcggaatggaggtttgcggtgtgttgcggtggtttttgtagattttagtagcgagttttttcgtggaagttgtatttgtattttttttattgaagtggggatattttgtaggtattttatgtttgtggttttatttgtttagataaagaaataaaaagtttttatttttatgaagtttgtggaatggagtgatgataaagtttgtagttatatatatagagtataatatgttgttttttggttttttgtttgtgttatggagggcgttttaaatttttattgggtcgatttaa

SEQ ID NO: 68 - DNA, 6264 bp, Artificial Sequence
  chemically treated genomic DNA (Homo sapiens)
ttaagtcgatttagtgagagtttgggacgttttttatgatataagtagggggttagggaatagtatattatattttgtatgtatgattgtaaattttgttattattttattttatagattttataaaagtaaaagttttttgtttttttgtttgaataaatggagttataagtataggatgtttgtaagatgtttttattttagtgggagaggtgtaaatataatttttacgaagaaattcgttattgaagtttgtagaagttatcgtaatatatcgtaaatttttatttcgcgatcgttgaatgatagagatatttttgaaatgttttaaatttgttgtttatttgtggtttggtggtcgtgttaaaagtttgcggagtttttaaagaaggtattaatttttttcggaggttttgttaaaagttgtgggaaacgaagggagttaggtacgtacgtttttttgtaatttaaaattttcgagattgtatttattaaaatttttttttataaagaggtaagggtgatttagttgttattgtggatattaagatcgaaatttaattaaaaataaagtaaaggtattcgttttagtaacgtatgttttattttagtaaaaagtaaaaagatatagtaaagaataaggttttcggttttcgtatttttgatttttaagaattgtaaaaaagttaagatttagtgaaagacgaaaagtttgagtggttgttgggttcgcgggcggttcgtttgatttcggagtagttggaggaattcgtttcgaggttagggtttcgtcgcgtttttacgacggttgtgggcgtagagtttagaggatggagttttttttttttgaaattcgttcgaagttcggaaagtttcggttttttcgcgcgggttgcggtttttaggtttttttttcgacgcgttcgagggcgcggattagttttcggtacgcgatttcgtatattttcgggttcgacgttttggtcgttcgtttatttatcggtattattttggattcgaatcgtatggaagcgggtggttagattgcggtttcggtcgagttgaggtgtttcggagggtcgcggatgcgggggaggggagcggagagcgaggtcgttcggatttgttgcgaggcggcggcggcggtagcggcggcgcgcgggttcgaagggtttttcgcgcgggttggggtattaataagtttcgggttttttcgtttcggtcgggttttttgacgcggttttgttttttcgacgttcgtgacggtcggggttttttttttcgtttcgaaattaattaatttcgggtcgggttttagtcgagttcgtgtcggttttcgtttttcgcgtcgatttcgttcgcggcgcgttcggcggtttgggggaggggcggtcgcgggaacgggagttgcgcgcgtttgcgcgggttcggttgggtagacggggagcggcgggagtcggtcgtttttttttttttcgtttcggattgaagtgcggtcggggtcgcgcggcggagcggttggagcgcgcgttttttagcggagtcggggtaattggaaggtcgcgttttaggaaaataggatggtagtgaatggtatcgagtcgttttagggttgtcgtcgttattttttcggcggtttcgagtcgtgcgaggtaggggattttttgtttttagaatagggcgttcgacgttgggcgcgtggatagagtttttcggcggtcgcgtcgttgggttaggcggagagaggcggacggattttaggggaggttcgggttacgtcgcggaaattattcgattttttggaggcggttaggatcgattttgtttcgataaaatggagtttttcgtgtggttttagttcgcggcgcgtttttagagttttttagtgattcggttttcggattgttcgttttttattttatttgtcgttgtttaaattttaatttaaaatttatgtgttatttgttgtaaggttaataaacgtatatcgtaaattggataaagggataatttttatgttgtgtatgttttattataataaaaataaattttgtaaaaatgtgttaggtagtattttgaggagtttttttggggggtgttgggaatattttgtaaatagttttcgatacggggagtcggtggatattatttttttttagggagggaggttaaggtttagggaaatggtagggttgttttttaaagagtagtagagcgggtttaggtttttattttattttttagagagatatatattgcgggaattttaattttaggaagttttgttttagtaagttgttagtgtaagtttatttagaattatttttttttgtttttatatatgattttagaatttgaagtggggtaaattttttgggtttatttagtattaagaatagataatttttttttagtttattatattttttattagaatttttatcgaattttttattgtattattttagatattgtatttggaaatattaaattacggttaatttaattagaatttaacgttttcgttcgggcgtagtggtttacgtttgtaattttagtattttgggaggtcgaggcgggtagattatttgaggttaggagttcgagattagtttggttacgtggtgaaatttttgtttttattaaaaatataaaaattagtcgggtatggtggcgtatgtttgtaatgttagttattcgggaggttgaggtaggagaattttttgaatttgggaagcggaggttgtaatgagtagagattattttattgtattttagtttgggtaacgagagtgaaattttatttgaaaaaaaaaaaaagaatttaacgtttttaaaaaatttggtttatagttttgtttttttaagagggttatattgagttaagtaaaataaatttattttttatttagtaaatatttattaaatatttgttatttggtagatatttttttaagttttagggatatattaatgaataaaaagtttaaaagataagtgtagttattgtgaaaaaaatagaataaggtaagagaaggggataaggtgtataggtgtaattttaaatatggtggttaaggtaagttttattgaaaaggcggtgtgtgagtatagttttgaaggaaatgagggtgtgaattttataaatatgaaggaagatttttaggtagagggaatagttaacgttaaggtttgatatgggagtttgtttggtaaattttgggattattaaggaggttaagatagttggagtagacgatgaggggagagtagtaggagatgagatggagtgatatgaagggttagataaggagggttttgtaggttattttaaggattttatttttgttttgagtgaaatggggagttatggaaaggttttgaatagaagagtgatgttagttgatatattttaagagttgttgtggaaaattgaaagttaatagagaatagtaagaaatttttgtgataagttaagtaaaagatggaagtggtttgtttaaaggcgataatagcgtttatggtaaatagtggttaggttttggatatatttttaagtttaaatttatagaattttttgatagattagatgtggaatatgagagaaagaagtttaaatttttgttttaaaagatggaagttgttataaattaaaatggagaagattatgagtggattaagttatagaaaagaggagattaattgggaatatgttaatttttagaattttaataataaaagaaattttaatattgaaatttagtacgtttgtgggaagtaataattttttttttttttaatttttaggtttggggttatatatgtaggtttgttatataggtaaattcgtgttataggggtttgttgtatagattattttattatttaggtatgaagtttagtatttaatagttattttttttgttttatttttttcgtttattttttatttttaagtaggttttattgtttgttgtttttttttttgtatttatgagtttttattatttagtttttttttttaagtgagaatatgtagtattgggttttttgtttttacgttagtttgttaaggataatagtttttatttttatttatgtttttataaaagatatgattttgatattttttatggttgtatagtattttatggtgtatatgtagtatattttttttatttagtttgttattgatggatatttaggttgatttaatgtttttgttattgtgaatagtgttataatgaatatttatatgtatgtgtttttatggtagaatgatttatatttttttgggtatgtatttaataacgggatttttgggttgaatggtagttttgggaagtaataattttttttggtaaattgtagtttataaagggattattttatattaaaaaatttattttatattttattggggtttttttttatttttttgtagataaagaagtttttaaaatagttgaagatattatgatttatagttatttaggaaaagaattttggatattggttattaattttttagtttttattaaaaaatcgtgttttattattattttaaaattggttgtatataatagtaaattatatttagtatgagtgttggtagttttagtttattaataaaataattataatagaaatggaagtaaggagagaagaattggaataagatagtttagttttatttcgttattgtttgtttatataaatgttttgtttaagggaagggaggagaaaagggatagtaattggtaatatgttttgaaatttatttttagttaattgagaatttttagttgttaaatagtaggtatgttgaggatttttttttttttaattatagaagcgtgaaattaaagaatttttgtttgtgttttggttttatttttttagattttgtattatttaaatatggtttttagaagggttgttttttattaagttttaattttttttcgtttttatttttatttgtttatttttttaagagtttttgtttggttttttttattttataattttttatttaattttaagaaagataagttaaaatgttatattttgagcggggaggagttatttttttttttggtttttattttattttttggtatagtataattaattatttatttggtttgaatttaaatgtttaagtttttaattttttttttgtgttattcgtttttattttttatagatgttttaaattttgagtttttttttttttttagaagatgaatttttattttatttagttaatgaaatagagattattgagattgtatttttgtaatatttattttttttatttttaatttatttgggtttttttttattttttttttattttttttgtttattttttttattaatattcgtgtggttgtattttgttaggttttgttttagattttagaggtaatagagaagagatttgtttttatggagtttatattttagttgggaggagttagataataaatatatgaataaggtaataataaatgttacgaaaaaaatagtaattaggtaaatttaagagaatagtatttgttttagataggttggttagagaaagtttttgaggaatgaggggagggagggaattagattttgggtagtgggaatagtaaggataaagagtttgaggtagttttgtgtttggtattttaaagatatggtaaaaagattagtgtgtttagggtagagtgaataaggaggggagtggtaagagaggtggaagatgtagttagtgtttaggttatgtagaattatttaatattttattaattatttttttttttgaaattagagatattttatttttatagtttttttaatttacggatttatttagttattttttatattttttttaagttagtagtaatttgaaagaaaaatggggtagaagtttgtgtattaagtttttttgtatttatttatatttttttttttgttttaaaaatttttttttttttttattttattttatatggtaaatttttattcgttttttaagtttttatttaaatgtttaaatgtttttttttttttttaagaaataaggttttatattgttattgaggttggagtgtagtggtatgattatagtttattgtaattttaaattgttgagattaagttatttttttattttagttttttaagtagttgtgattataagtatgtattattatgtttggttaatttttaaatgttttgtagagatggtgttttattgtgttgttt

SEQ ID NO: 69 - DNA, 9106 bp, Artificial Sequence
  chemically treated genomic DNA (Homo sapiens)
tttatgttattttttcgatttagttttttgagtagttgggattataggcgtttgttattatattcggtttttttttttttttttttagtagagatggggttttatcgtgttagttaggatggttttaattttttgatttcgtgatttgttggttttaattttttgatttcgtgatttgttcgttttagttttttaaagtgttgggattataggtttgagttatcgtgtttggttttattgatttaattttttattggatttaatttttttattttttttagtttgtttagatttatttttttttgagttagttttggttatttgtgtatagttgtttatagtatttatttaaaatgttttttttttttttttttgtaaggtttatagtgatgtttttatttttatgtttgattttagttatttgtatttttattttttattttttagtttagttaaagatttgttagtgttgtttatttttttaaaatttttattttagttattgtattttttagttttagaattttgatttggtttattttttataatttgtttttttgttgatattttgtttatatatttattgtttatttggttttttttagttttttgtttatggttttttttagttagttaagtatatttaagattatttaaataaacgtttaagtaaatttttaaatatttaaataaaagtttttgtttagtaagtttaatgtttaggtttttttagggatggtttttattaattttttttttttgtgaatgggttgtatttttttttttttttggtatgttttttattttatttatttatttattttttggttaaaaattgggtatttcgggtttggtatggtggtttacgtttgtaattttagtattttgggatgtcgaggtgggtgggttataaggttaggtattcgagattattttggttaatataatgaaattttgtttttattaaaaatataaaaaattagttgggtgtggtggtgggtgtttgtaattttagtaattcggaaggttgaggtaggagaatcgtttgaatttgggaggtggaggttgtaggttgttgagatcgcgttattgtattttagttttggtgatagtgggagtttttgttttaaaaaaaaaaaaaaaaataaaaattgggtattttaatttgaaaaagttgattgaaagaaaaaaaaatttgggtattttgaatattataatgtggtaattttggaaattagattttgttaatgtttattaagggttgtagttttttgtttgtttagattatgttttagtttttttggttattagtttttattttgaagttagttaggggtttttagttattagttattttattagtatattaataatatttattatatttgagattttaaaggttttagaagtttgtgttaggaacggggataaagattaaatatttatttttattatattataattttttaatttatttattgagttattatgttttattttagggtatatgtagtttttttatattaggggaaatttagtttattaagtgtaatattgaaagttaaataataataatataataataattaattagggatgggcgcggtggtttatgtttgtaatttaattttagtattttaggagatcgaagcgggagggttattttaggttaggaattcgagattattttggttaatatggtaaaaattttttttttattaaaattataaaaattagttgggtagggtggtatatatttgtaattttagttaatttgggaggttgaggtaagagaattatttgaatttgggaggtagaggttgtagtgatttgagatcgtgttattgtattttagtttgggcgaaaaagtaagattttgttttaaaataataataataataaattaggttggggagttattttttaggaattttgtagtaagggtttatatgtattagttagagttggattttgtgatttttaggtgtttttttttttttaagaatcgattatttttataattttgttaaatgtaattaattttttaaatttattaaagattattatttggattattatttttttagttaaaatgttggtttgttttagttttatttagggttaatttgtatttaaatagttttttgaaaatatttggttttttttatttatttatggttaattgatttttgataagaagttaagataatttaataggaaaaggataatttttttaacgaatggtgttgggataattagaagtttatatgtaaaataatgaatttggattttaattttatattatatataaaaattattttaaaatggattaataatttaaatataggagttaaaattataaaatttttagaagaaaatataggagtaaatttttataattttggatttgataatgatattttatataggatattaaatgtataaataataaaagaaaaaatagttaagttgaagtttattaaaattaaagttttatgtgtatgaaaggatattagaaagtgaaaaagataattatagaatgggagagaaatatttgtaaagtatatatttgataagggtttagtgtttagaatatataaagaatttttataatttaataataaaaagataatttaattttaaaatgggtaaaggatttgaataggtatgtttttaaagaagatatatagatggttaataaatatatgaaaaggagaatgtttaatagtattagttattaggaaaatgtaaattaaaattagaatgaggtatcgttgtatatttattaggataataataaaatggaaaataataagtgttggtgaggatgtggagaaattgggattttgtatattgttggtaggaatataaaatggtttagttatcgtggaaattatttggggttttttaaatagttaaatattgaaggttgggtacggtggtttatgtttataatttagtattgtgggaggttaaggtaggtagataatttgagtttaggattaagattagtttggttaatatggggaaattttatttttattaaaaatataaaaattagttagatgtggtggtatatatttgtaattttagttatttaggaggtcgaggtaagataattgttcgaatttgggaggtagaggttgtagtgagttaagattgcggttattgtattttaggttgggtaatagagtaaggttttgttttaaaaaaaaaaaaaaattgaattattatgcgatttaataatttaatttttatgtatgtattttttttaaataaaaatgggtttttaaataaatatatgtatatgtatgtttatggtagtattatttataaagttaaaagatgtaaatagttttaatgtttatagatgaataaattgtggtatatatgatatatatatatatacgtatatatatatatatatatatatataaatattatttagttataaaaaggaataaagtttgttatatgttatttgaggatgaatttcgaaaatatgttaagtgaaagatataaaagtttatatattgtgatttcgtttatatgaagtatttaaagtaagtaaatatagagatagaagtagattggtaattgttaggggttgggggggaagagggtattgggaagaaattttttaatgggtatggggtttttttttcggaatgaggaaaatgttttggaattagatagaggtggtggttgtatagtattgtgaatttattaaatgttattgaaatgtttattttaaaatggtaaattttatgttatgtgaattttattttaagttaaaaaaaaaaaagtaaaattatttagataacgttaaattattgataattttaatttattttatagattttaaattttggaattataattttttaggttaatttttaggttaggtagtaatttatttttgtttaattttatgtagagtttttggtggttttgaagcgttttagggaatagattaggaatatttttatggtgttagtttatattgggttattagtgtttttttaatgtgagaataatcgggaggaggaggggatgtggatttaaaattataagaaagagtgttttcgaagtttatgttttatcgttttacgttgttgttaggttcgtaggaagatgataggttcggtttttattttttttaaggtcgtcgtttagtttcgacgtcgggatgattttgttatttacgcggcgtgaaggttatttttttcgcgcgttcgggattttaggtggggttttagtggacgagggaacgcggcgtcgtttatcggggtgtgtttgggcgggcgtggggcggggtttgggtcggcgtcgggttcggtcgggcgtttagttagttgcgtaaatttcgttggagcgcggcggtagagtaggtgagcgggcggtgtcggggggtgtttaggttagggttttgtcgtttgcggcgttgagggttcggggtggggttgcgttttgagggttttgttttgtttttcgtacgtttttggttacggtttttttttcggttgtgggtttgcggtttttgcgtgcgtagcgtttttggtttttgcggttagcgcgggggcggagagaggagagtgttcggtaggcggcggttgggtcggttcggaattgggtcgtggaaggatcgcggggagcggtttttaggttttcggttttattgcgtttttatttttttgcgttcgtttgtcgtcgagtttcggttgggggtgggcgcggcgcgagcggttaaagggtcggtgtatttaaaggagcggtgtacgtgggtttttgaggcgtgtagtaggcgggggcgttttgttttttttttttttcgtcggagattttcgttgcgtcgagtttattcggtttttagtatcgggttttgggtatgtttttttcgggaaggaggcgcgcgggggttttgttcgtacgtgaggggtagggtcgtaggtttaagtttagagtcggtttttgttagtagcggtgtttggttgttttattaggtatttttagtagtgaggagatagttagaagtaagtttttggagttgaaggaatttgagatagaagttagttttttttttgaattttattgatgaagaaattgaggttatagagttaaagtgattttttttaaggtcgtttaggtacgatatagtagagttaggtttcgattttagtgttttggtttttagatttgttgtttattttttcgagtagattttatttttgtttattgttttaataagtattttttttgaaaggtatgaacggtgttgagtgaagtaattgtatttttatttataaatggagaatttgagagtattttatagagacgattgtagattaatttaatttagaagcgatagtttggggttgttaaggttgtttacgaagtaatttgattaggatcgattttagtttttagtaaggaagtttttgatgtttttgtagttaattttgtagatatttgagtttttaaggtttttagttaagatttttggcggtaattggagtttcgggataagttgttttaggtgtgtgagttttaggttttttttttttgaatgtggttgtgggtagtcggtgattggcgtaggtgtagaaggggtttggtttttggttttattttagagttgcgtttttacgacgtttacgttgagttttgggttttagggtagagattggagtgagggtttgggggtatgttgttttgaagtgggatggatgtattaggtttttggggaaaattttgtattttttggtgttgaagtgtttatgtgttaagttttgagtttagtatgtttatatgtggggagtgagtggtttgtttttgtttatttgaaagagtagtaaggaggaggaggagtaagggttaggggttgttgttggggtgtttggagttgtggtgtataatgttatatttgtttttttttcgtagttgtttatcgtttttttaaggggggtttgttttttgtttattttggtttttttttgttatcgatgttaataatgatatatatttcgtttatgagttggttataataaaaagttattttgtatagaatattagaatttaagattttaagaattttaatgatattgaaatagtttattattatttttttatagaagaggaaataagtttagggagttaagtagttagtttagttatgtggttttagtgttttaagtattaggatttgaatatagttggttatattgtttttattttttgagtttttgcgtaggaggtttttgtatttaatttttattcgtgtttttttattattgttgggaaagttttgtggagtttttatgagtaattttttgataaataaataaaatttttttaaagaaattaaagtagtgtgtgtaggttatatgtagtgtgtttaatgaaaatatttttggcgggtttttagttgttgttttgattttcggatattgtttagttggggattgataagatagtaaatatttttgtaagtatttttatttgttttatttttagttgttatagttgcggaaaggcgggggtgaggttgagaggtttcgagaggaatattttttattgggttttaattttggagatgggatgattattatgttaatgtttggagaaaagaatgattttaggttgggtgttgtggtttatgtttgtaattttagtattttgggaggtcgaggtgggtggattatttgaggtcggaagtttgagattagtttgattaatatggagaaattttatttttattaaaaatataaaattagtcgggcgtggtggtatatgtttgtaattttagttatttaggaggttgaggtaggagaatcgtttgaatttaggaggcggaggttgtagtgagtcgagatcgggttatggtattttagtttgggtaataagagtaaaattttattttaaaaaaaaaaaaatggttttatattagtttttaggaaagattagatgttagtgagggagattattttttgagagtttttttattgagtgggagaatgggttgtttgtttatttttgtgaaaattttagaacgggaagaataatttaaagggtgtttattattttgttgtattttaattagaaatttattggattttttttaaaataaaagtaatttatgtttattttagaaaattagggaaaaaaaattttttttgagatggagttttatttttgttgtttaggttggagtgcgatggtatgattttagttaattgtaatttttgtttgtcgggttttagcgatttttttgttttagttttttgggtagttgggattataggtgtttgttattatttttagttaatttttgtatttttattagaggcggggttttattatgttggttaggttggttttaaatttttgattttaggtgattcgttaattttggttttttaaaatgttggtattataagtataagttattgcgttgggttgagataattatttttaatatgtatttttttttatattgtttatatatgtatatttatttattaaaataatagagggagggaatcgtagtgaagtttgtgtattttgttttttttgttatgtttttagaattttttttttattgagtatttatggaaaagtagatttgatggttgtgtagagtatttgaattatttattttattagttttatagtaggatatttttttatttttttttatgttttagagaagtagtgttttttgttttttttatgtttatatgtgggtattttttattatggagttaaatttatttgggtaagtagtagagggagagtagagtgagttttgggggtaggagagagatttgagagttttgaggtgatagatgagttggtgagtgagtgattagggagtattttttgatatatatttgttcgtggtgaaggtatgtgttttgtgagtgtgtttttagaaagtttgtgtagtgtgtggtgggtttgtttgtgtgattaaattttggttattgggtacgtgatttttataagtgttgattgggttgagaagagttttttgatgggtagtttggagatttgagttgtaattgtggtttttggttatgggatattaattgattatttttgtttttttaggttttagttgtttttaattataatatagggagttgattaggtggcgttgatggtttttacggtttttgttagttttgatattgttttatggatatgtttttttatttgataatatgtttacgtggttatagtgtttggggttgggtcgggaatggaaatttgatttttggggtttggtttttgaagttagtttatgtgtttggtggtttagtagattcgtaattttttaagaggtatatttataggttatcgtgtttttttttattgtgttttttttttattttattttttttataattacgatttattgaatatttattgtgtgttggatattttataggttatttttaggttttacgataattttgtaaggtatgtttgttttgttttttatagtagaggaaatgagttgtgttagattagattgtttgaggttttttggttagggagtatgtggtttaaattatataggtaggcgatttgaattttgttagtttttaaagtttttgtttttgatcgttgatttgttgttgtttgtttaaaaataaatgtgtttttggagtttattttagaggggcgtgttaggggtttttttttttatttttttataaattatttttttttttggttgttttaggaaatgagagaattttgtttgggttttaggtatttttgagtgggatagggttgttagaggtaagtttagagtttggtttaaaatttaggaggttttattagagggtttttggggtttgtggttcgggagggtggtagggtagtattttatttttttttgagatttaggttttagttttggtttaggttagggagaattatttttaagtggtatgtgttattatatgagttgagatggatggttagttggattaaatatatagtcgggtatttagggttagggggaggaaggtgagtagggaagttgtgggtaattgtttgggtattatttgattttagtaaatttttttttgttttaagt

SEQ ID NO: 70 - DNA, 9106 bp, Artificial Sequence
  chemically treated genomic DNA (Homo sapiens)
gtttaaaataaggaagagtttgttaaggttaggtgatatttagataattgtttatagtttttttgtttatttttttttttttggttttgggtattcgattatgtatttggtttagttgattatttattttagtttatatagtaatatatattatttggggatggttttttttggtttaagttagagttggggtttgagttttaaagggaagtgaggtattgttttattattttttcggattataggttttaggggttttttgatggggttttttgaattttgggttaggttttagatttatttttaatagttttgttttatttagaagtgtttggggtttaggtagagtttttttattttttgaagtagttagggaaaagggtggtttgtggggaagtgggagagggagtttttagtacgtttttttggagtaggttttagaaatatatttatttttaaataagtagtagtaagttagcggttaaaagtagaggttttggagattgatagggtttagatcgtttgtttatgtgatttgaattatatattttttggttaagaggttttagatagtttaatttgatatagtttattttttttgttgtaaaaagtagaataggtatattttgtaagattatcgtaaaatttagagataatttgtaaagtgtttagtatatagtagatgtttaataagtcgtagttataaagaagatgaaatggaggagggatatagtgagaaaggatacggtagtttatggatgtgttttttggaaagttacggatttgttgaattattagatatatgaattggttttaaaggttaggttttagagattaagtttttattttcggtttagttttaggtattatggttacgtaaatatattattaaatgaaaggatatatttataggataatgttagagttggtaaggatcgtaaaggttattaacgttatttagttagttttttgtattataattaaggataattgaagtttagaggggtaaaagtaattagttaatgttttatggttaaaagttatagttataatttaagtttttaaattgtttattaaggagttttttttagtttagttagtatttgtgagggttacgtatttagtggttagggtttggttatataggtaggtttattatatattatataggttttttgggagtatatttataagatatatgtttttattacgggtaggtatgtgttaagaaatgttttttaattatttatttattagtttatttgttattttaaaatttttaagttttttttttgtttttagggtttattttgttttttttttgttatttgtttaggtaggtttggttttatggtggggagtgtttatatatgggtatggggaggatagagggtattgtttttttggggtataagggagggtgggaaagtgttttgttgtgggattggtaggataaataatttaaatgttttatatagttattaaatttgtttttttatgagtatttaataaaaggaaaattttgaaggtataatagaaaaaataggatatataaattttattacggttttttttttttattgttttaatagataaatatgtatatgtgaatagtgtggaaggaaatgtatgttaagagtggttattttagtttagcgtaatggtttatgtttgtaatattagtattttgggaggttaaggttggcggattatttgaggttaggagtttgagattagtttggttaatatggtgaaatttcgtttttaataaaaatataaaaattagttgggagtggtggtaggtatttgtaattttagttatttaggaggttgaggtaggagagtcgttagaattcggtaagtagaggttgtagttagttgagattatattatcgtattttagtttgggtaataagagtgaaattttattttaaaaaaaattttttttttttaattttttagaataaatatgaattatttttattttaaaaagagtttagtaagtttttggttaaggtatagtagaatggtggatattttttgaattgtttttttcgttttagaatttttataaagatgaataagtagtttatttttttatttagtgaagaggtttttaagaaatgattttttttattgatatttgattttttttgaggattgatgtgaaattatttttttttttttgagatggagttttgtttttgttgtttaggttggagtgttatggttcgatttcggtttattgtaattttcgttttttgggtttaagcgatttttttgttttagttttttgagtagttgggattataggtatgtgttattacgttcggttaattttgtatttttagtaaagatggggtttttttatgttggttaggttggttttaaattttcgattttaggtgatttatttatttcggttttttaaagtgttgggattatagatatgagttatagtatttagtttgaaattatttttttttttagatattaatatgatggttattttatttttaggattggagtttagtggaaaatgtttttttcggggttttttagttttattttcgttttttcgtagttgtggtagttgggaatagaataggtgggaatatttgtagaaatatttgttgttttattagtttttaattaaatagtgttcgaaagttaaagtaatagttgaaaattcgttagagatgtttttattagatatattgtatgtgatttatatatattgttttggtttttttaaaaaaattttgtttgtttgttaggaagttgtttatggggattttataaaatttttttagtagtagtggagagatacgggtaggagttgaatataggaattttttgcgtaaaaatttaagagataaagatagtgtagttagttatgtttaaattttggtgtttaaagtattgaagttatataattggattagttgtttaattttttgaatttgtttttttttttgtaaaaaggtaataataaattattttagtgttattgaaatttttaagattttaaattttaatattttgtataagatagttttttattatgattaatttataagcgagatatatgttattattaatatcgataatagagaaaggttaaagtaggtaagaggtaaattttttttggggggacggtgagtagttacggaggggagataggtgtgatattatgtattatagttttaggtattttagtagtagtttttagtttttgtttttttttttttttgttgtttttttaaatagataggaataagttatttattttttatatgtgaatatgttggatttaagatttggtatatgggtattttaatattaaagggtatagagttttttttaaaaatttgatatatttattttattttaaagtaatatgtttttaagtttttattttagtttttgttttggaatttaaggtttaacgtgggcgtcgtgaggacgtagttttgaggtggggttaagaattaggttttttttgtatttgcgttagttatcggttgtttataattatatttaggagagaagaatttgaggtttatatatttgaagtagtttatttcgagattttaattatcgttaaaggttttggttgaaggttttggaggtttaggtgtttgtagaattggttatagaggtattagaggtttttttattggaagttggggtcggttttaattaagttatttcgtagatagttttggtaattttaggttgtcgtttttgagttaagttagtttataatcgtttttatggaatgtttttaggttttttatttgtaaatagggatgtagttattttatttaatatcgtttatattttttaaagggaatatttattaaggtaataaataggggtgaggtttgttcggagggatggatagtagatttagaagttaggatattggggtcgaagtttggttttgttatatcgtatttgggcgattttgggaaaagttattttagttttgtggttttagtttttttattagtaaaatttagaggggggattagtttttgttttaggtttttttagttttaaaagtttgtttttggttgtttttttattgttggaaatgtttgataaaatagttaaatatcgttgttaatagaaatcggttttaggtttgagtttgcggttttgttttttacgtgcgggtagagttttcgcgcgtttttttttcggggaaagtatgtttaggattcggtgttagaggtcgaatggattcggcgtaacggaggttttcggcgagagagaagaagaataaaacgttttcgtttgttatacgttttagagatttacgtgtatcgtttttttaaatgtatcggttttttaatcgttcgcgtcgcgtttatttttagtcggggttcggcggtaggcgggcgtagggaagtggggacgtagtgaggtcgaaggtttgagggtcgtttttcgcgatttttttacgatttagtttcgggtcggtttagtcgtcgtttgtcgggtattttttttttttcgttttcgcgttggtcgtagaggttaggagcgttgcgtacgtaggggtcgtagatttatagtcggggaagggatcgtggttagaggcgtgcggagggtagggtagggtttttagggcgtagttttatttcgggtttttagcgtcgtaggcgatagggttttggtttgggtatttttcggtatcgttcgtttatttgttttgtcgtcgcgttttagcggagtttacgtagttggttgagcgttcggtcggattcggcgtcggtttaggtttcgttttacgttcgtttaggtatatttcggtgggcgacgtcgcgttttttcgtttattggggttttatttggagtttcgggcgcgcggggagggtggtttttacgtcgcgtggatgatagggttatttcgacgtcggaattaagcgacgattttagaaggagtggaggtcgggtttgttatttttttgcgggtttggtagtagcgtggggcggtaggatataggtttcgaggatatttttttttgtagttttgggtttatattttttttttttttcggttgtttttatattaaaggagtattaatggtttaatgtgagttaatattatgagaatgtttttggtttgttttttagggcgttttagagttattaggagttttgtataaaattgaataggaataaattgttgtttgatttgagaattggtttagggggttgtggttttaggatttggggtttgtggggtaggttgagattgttaataatttggcgttgtttgagtagttttatttttttttttttaatttaaggtgaaatttatataatataaaatttattattttaaagtgggtattttagtggtatttagtgaatttataatgttgtgtaattattatttttgtttagttttaaaatattttttttatttcgaaagaaaaattttatatttattgagaagtttttttttaatgttttttttttttttagtttttggtaattattagtttatttttgtttttatatttatttattttagatattttatataaacggaattatagtgtgtggatttttgtgttttttatttagtatgttttcgaggtttatttttaggtagtatgtaatagattttatttttttttatgattgaatagtgtttgtgtgtgtatatgtatatgtgtgtgcgtgtgtgtgtgtgtattatgtatgttatagtttatttatttatggatattggggttgtttgtattttttggttttgtgaataatgttattatgaatatgtatgtatatgtatttgtttgagagtttatttttatttggggagggtatatatataggggttgaattgttggatcgtatggtaatttaatttttttttttttttgagatagagttttgttttgttgtttagtttagagtgtagtggtcgtaattttggtttattgtaatttttgttttttaggttcgagtaattattttgtttcggttttttgagtagttggagttataggtgtgtgttattatatttggttaatttttgtatttttagtagagatggggtttttttatgttggttaggttggttttgattttgaatttaagttatttgtttgttttggttttttatagtgttggattataggtatgagttatcgtgtttagtttttagtgtttaattatttggggaattttaagtggtttttacgatggttgaattattttatatttttattagtaatgtataggattttaatttttttatatttttattaatatttgttattttttattttattgttattttagtaggtgtgtagcggtattttattttggttttggtttatatttttttaataattaatgttattaagtatttttttttttatgtgtttgttggttatttgtatattttttttggagatatgtttatttaagttttttgtttattttaaaattgggttgtttttttgttgttgggttgtaagagttttttatatattttggatattagatttttattagatatatgttttgtaaatattttttttttattttgtaattgttttttttattttttgatgtttttttatgtatataaaattttaattttgatgaattttagtttaattgtttttttttttgttgtttgtgtatttggtgttttgtgtgagatattattgttaaatttaaggttgtgaagatttatttttgtgtttttttttaagagttttatagttttagtttttatatttaggttgttgatttattttaagataatttttgtatgtagtgtgaggttagggtttaagtttattgttttgtatgtggatttttagttgttttagtattattcgttgaagagattgttttttttttattgaattgttttggttttttgttaaaaattaattggttatagatggatggggaaaattaaatatttttaaagagttgtttaaatgtagattaattttggatggaattggggtaggttagtattttggttaagaaaataatggtttaaataatgatttttgataaatttgagaaattaattatatttaatagaattataaaaataatcgatttttggaaaaggaaggatatttgaaggttataaagtttaattttaattgatgtatatgagtttttgttatagaatttttgggaaataattttttaatttggtttgttgttgttgttgttttgaaatagggttttgttttttcgtttaggttggagtgtagtggtacgattttagattattgtaatttttgttttttaagtttaagtgatttttttgttttagttttttaagttagttggaattataggtatgtgttattttgtttagttaatttttgtaattttagtagagagggggtttttgttatgttgattagggtggtttcgaatttttgatttgaagtgattttttcgtttcggttttttgaagtgttgggattagattataggtatgagttatcgcgtttatttttgattggttgttgttgtgttgttgttatttagtttttagtgttgtatttgataggttgaattttttttaatgtgaagaggttgtatatgttttaaggtgaagtataatgatttaataaatgagttaggaagttgtgatataataaaaataaatatttggtttttattttcgtttttggtataagtttttaaaatttttggaattttaggtgtgatgaatgttgttggtatgttaatgaaatgattggtggttggggatttttgattagttttaggataggggttggtggttagaaagattaaggtatgatttaaataaatagaagattgtagtttttaataagtattaataggatttgatttttagagttattatattataatatttaaaatgtttaggttttttttttttttaattagtttttttaggttgaagtgtttagtttttgtttttttttttttttttgagatagagatttttattgttattagggttggagtgtagtggcgcgattttagtagtttgtaatttttattttttaggtttaagcgatttttttgttttagtttttcgagttgttgggattataggtatttattattatatttagttaattttttgtatttttagtagagatagggttttattatgttggttaggatggtttcgaatgtttgattttgtgatttatttatttcggtattttaaagtgttgggattataggcgtgagttattatgttaggttcgaagtgtttagtttttaattaaaaagtaaataaataaataaaataggaagtatattaagaaaaaagaaaagtataatttatttataggaaaaagaaattgatagaaattatttttggggaggtttagatattgaatttgttagataaagatttttatttaaatgtttaaaagtttatttaaacgtttatttaaatggttttaaatatgtttaattaattaaaggaaattatggataaagaattaaaggaagttaggtaaataataaatgtataaatagaatattagtaaagagataaattatgaaaaataaattaaattaaaattttggagttgaaaagtataatagttgaaatgaaaattttgaaaagatgaataatattgataaatttttagttagattgagaaataaagagtaaagatgtaaataattaaaattagatatgaaagtaggggtattattatggattttataggaaaaaaaaaaaaaagtattttaagtgaatattgtgaataattgtatataaatgattaaaattgatttaggaagaaataaatttgaataagttaggaaaagtaaagagattgaatttaataagaggttgaattagtaaggttaggtacgatggtttaagtttgtaattttagtattttgggaggttgagacgggtagattacgaggttaggagattgagattagtagattacgaggttaggagattgagattattttggttaatacggtgaaattttatttttattaaaaaaaaaaaaaaaaaagtcgggtgtggtggtaggcgtttgtagttttagttatttaggaggttgagtcgggagaatggtatgaa

SEQ ID NO: 71 - DNA, 10132 bp, Artificial Sequence
  chemically treated genomic DNA (Homo sapiens)
tatatgtaaggtaattggggtaggtaatgaggaaattaaaaaatgttattgttgtttttaacgagtataataagatggtaataattaatatttattgagttttttatatggtaggtagtattttgagttttttatagttatttaatttaattattataattattatataagggaaatatggaaattttatgtttttgttgtaggataagttattaagatagtgatttttgaaatattttatgtatataatgaatagtaaatggtttgagtaaaaatttttttttgatttcgtattttaatgatattaagatttgaattataggtatatgtagaagttattaaattagatttttttttttttaaataatagtatgagatgagttttttatatttattttttaagtatttattatatttattttaatatattagaagtggtgttttaatatattttaattttttttttattttaaggttgtttatttttaaaattataaggtttagaggaattataaaagataaagttatcgttttattaaatttgaaagtattgttaaagtaaattttttataatagttaattatttaaggaggagttaaattaaatttaatattgagtattttatggtattttgttggtatattgtttggttgttatttttggggtaggataatatgttttttttaggaaatattattatttagagatttttattattttgtgaatttttgtatggttttgtttttgaattagttttatttatgaaagttagatttgaaaaatttaggagaagttaggtgtcgtggtttatgttcgtaattttaatattttgggaggttaaggtgggtagatattaggtcgggagtttgatattagtttgattaatatggagaaattttatttttattaaaaatataaaattagttaggtatggtagtgtacgtttgtaattttagttatttgggaggttaaggtaggagaatcgtttgaattcgggcggtagaggttgcggtgagttgagattatgttattgtattttagtttgggtaataatagttaaattgttttaaaaaaaaaaaaaaaaaatttaggagttatttttagtttattttggtttaagttttatatataaagaatatttaaaataagttattgtaagttttataaagtaatttgtattggggaaaggattatatatgaaataggaatatatatgttattttttatgggatattttagagggatttcgagtttggttttagattattaataaaagagttatataaattttttggttttttagtgtatatgaaagttttttatattaaagtgtagtttgttaagtgtgtaataatatgtttaaaaaaataatgtatatattttaattttaaaatattgttaaaagatgttagggattatttgagtttttagcgagttataaatgttggtgtggggtattgttgagggttgttgattgattagggtggtagttgttgaaggttgggatgattggtaattttttaaaataaggtaataaggaagtttgttttatttttttgtttgttttgagatggagtttcgttttgttatttaggttggagtgtagtggtatgattttggtttattgtaatttttgttttttggtttaagtgatttttgtgttttagttttttgagtagttgggattataggtgtttgttatcgtgttcggttaatttttgttatttttagtagagatagggttttgttatgttggttagtttgggttcgaatttttggttttttaaagttttgggattataggtatgagttattgtatttggttatttattgattgttttatttattaaagatttttttgtagtatgtgatgttgtttggtagtattttatttatagatttttttttaaaattggggttaatttttttaaattttgttattgttttgttaattaatattttgaattttttgttgttatttaaatataatttatagtatatttattaggagtagattttattttaataaattattttttttgtttattcgtaaaaagtatttttttatttattaaagttttattatgagatggtaataatgtagttatatttttaggttttatttttaattttatttgttttgttatttttgttatatttatagtgattttttttattgaagttttgaattttttaatattagtgatgaggattggaattaattttttttaaatttttgttaatgtggagatatatgtatatatttatgtataatgtatgtgtgtgtgtatatgtgtgtgtgtatatatatatatatatatatatatatatatatatatataaaatggataggtatgttgttttgtttgtaaaatattatttagtgtgttaattgaaatatatataatttttaaatatttatatatgtattttatatatattatatatatatatatatatatatatatatattttttttttttttttttttttttttttaaagagtgttttattttgttatttagattggagtgtagtggtatagttagttgattgtagttttaaatttgggtttaaataattttgttattttagtgttttgagttgttgggaatataggtatgtgttattatttttggttaattaaaaaaaaaaaaaaattgtagagatagggttttgtattgttgtttaggttggttttaaaatttttggttttaagtaatttattttggttttttaaagtgttgggtttataggtatgagttattgtggttgatatatgtatttttaatttttcgtttttttttttttttttttttagtttttagttatatatcgtaagtggatattttgattttttatgaattataaatgtttttaatggtatttcgaatgatgaattttttttagaagatttttaatttattttgtttagaattattagaggaattatgatgatagttatagttttatgaaatgtattttgtaaataagatttgaaagttaaaatttttttttgatttttgggttttagaatggatgttgtgttagtaagtacgataatagtattagtttttgtatatttttattagaatttttggatgattaggtgtattgttaatgaggagtaatattttgaaaggaattttttttttgagtattagagtttaatagtgggttttaaatattttttaagttatgttgtaaatagatgtgttgttattaattagtttttgttggtttatttatagattatatttagtataatttttaagggtattaggatttttagaatggtaaaggaatgttggttttaaagttattagttgtattagtttttaataagagtattagtttgttttttgaagttttgaagataggtattgatttttttttagttatgaaagttttagatggaatttttttttaatagaaggtcgttttatatatatttaagatttgttgttttggttgggtacggtggtttatatttgtaattttagtattttgggagatcgaggcgggtagattgtttaaggttaggagtttaagattagtttggttaaatatggtgaaattttgtttttattaaaaatataaaattaatttggatatggtggtatattttgtaattttagttatttgggaggttgaggtagaagaatcgtttgaatttaggaggtagaggttgtaaaagatcgtattattgtattttagttttggtgataaagtaagattgttttaaaaataaaagattgttgtttagtgtagttgtttttattaatgattttagttagatttggataatttgatgtagtttttacgttagtatttgttgttttattttgtatttttatgttatgaagatagtttttttttttaaattttaggaattattttttttgttagtttttagttttttttttgtaatttttttattttttttagtttttatagaattgaagagttagggttttgttttggattaggttttggtttaagggaatgttgtggttgtttttattttttatttagattaattagaattttttttatattagtaataaggttgtttagttttattgttttttgtgtgtttattggagtagtatttttaattttttttaaaatttttttttttgtatttatgatttggttttttttttttgtatttataatttggttaattggagtaagaagtttagttttttgtttattaatattatttttttattaatttaattatgtttgtttttgatttaaagtgataggtttttttttttatttggatatttagaggtttttgtaggattattagttggtttaattttaaaattgtgtttttaggaatagggaggttttaggagggggagagagaagggaaagttcggtggaatagtttaaatatatatagggtttatggattaattttttttttttttatgagcgcggtttatggtgttttaaaataattgtaataatattaaagattattgattatagattataatagtagatataataataatgaaaaattttgaaatattgcgagagtattaaaatgtgatatagagatataaagcgagttaatgttgaaatataggtagtatttgttaagcggtataaaataatttatgtttgtatttttagaaagtataggtatagtaaagtaaggaatagtaaatgtttggggtagttgggattaaatgagttcgagtttatataagtgatgtgaaattgtttcgggttaggcggtttgtgtgttttttcgggtggtaattggtatgtttttagggtacggttagttttagcgggtttggaggcgaagatcgcgtatttttttttgttttcgcgtttttggttttcgcgggtttcggagcgattgggaggagttttaattttgggaaggattagttcgatttacgggagttcgggcggcgcgtaattagaattaattggttttacgttcgggggtagggggcggggtcgtcgaggaagggtcgagggcggggtcgggttcgggagtttgtggttttaggaagaggagggtaaggtgtttggttgcgcgtttggttgtaatgagttcggtttcggggtttcgtagggggtattcggtaggtaggtagggggcgtcgattgggtatcgagtaggtttgcgttttgtttcggttggaggggaaacgagggttagtggatcgggcgcgcggatcggagtggggtcgcgggttttttcggttttgtagggcggtttggagaagttgtatttttggattgaagcgtttagggcgggtggggacggtttcgcgttttagtttaagaaatattcggggatttggttgtcgttttttggcggtttcgagtagcgacgtcggcgtcggggcgtgtttttgtcgtttttgtttttcggggcgatgagcgttttcggggcgtttcggttgtttaaattttaaaaggttgtttttacgcgggtttggcgtttttttatatttggtcgtttgaaatgttgggggttggattttttgtttgtttatttcgaaaagtgaaaaggaggggttgtttcgtcgagttataatgaaaatataataggttcgcggggtgttcgggttaagattttgggttttttcgggttttagttggaggcggttagtttttggcggttagtatatttcggtattttttttttttatttaggaaatttgttgttgtttgtcggtttgagttaaaattataataatttttttttgtaaagtaattaattgttaagagcgtacgttttgttatttattattggtaaagtttagaaattttaagtttggttagagtgaaataaataaaaaggtcgaaacgtttgtagttggtcggtcgtggtggtttacgttttgtaattttaatattttgggaggtcgaggcgggcggattattagaggtcgggagttttcgattagtttaattaatacggtgaaatttcgtttttattaaaaatataaaaaaattagttaggtttgggcgtaagttattggggaggttgagataagagaatcgtttgaattttggaggtggaggttgtagtgagtcgagatcgttttattgtattttaatttcggcgatagagtgagatttcgaattaagaagaaaaaaaaaaaaaaagaacgaaacgtttgtagttggttagagtgtttttgtttaagaattttttatattttgttgtataaaggaaatggtgttttagaggtaagttgtaaaagttatatggtcgtagaggaggtagataggtagttttgttttggaggtatagtgtagggtttagttgtagtttttaggggcgggaagtcggggtttttttttatttatttgtttttttttttttttttttttatcgtattttttagtgtatgttttaggtttgatggaggttattttatatagggttattaaatatattgttgatggagtcgatgggtagatttttatagagagtgtagtgaatgaagacgatgatagtagaatgatcgaagtcgtttgggaagttgaataaagtttagaaaggtagtcggtttcgggtgggaggggttgcgtggggatgggtttatagagattttggaatttgtaggtgggttggtttttaattttagttttattttgtcgattttggtacgtttggtttattttttttgtttttgtttttgagttgtggagttgtgagataaggtatttaaggtattaggttattaataaatggtagttggtaggattatttggagggattattaaattagagtgaggtgaaaaaaggaatgattagttttgtaaaatttaagttgatttaaggaataaggaggtggtagttatattattttgtaaaggaagagaagtgaaaagagggttagatatagtggtgggcgtttttagttttagttattggggagattgaggtaggagaatcgtttgaaatttggaggtggatttgtagtgagttaagattgcgttattgtattgtagtttgggcgatagagggaggttttgttttaaaaaaaaaaagtgaaaagaggttaagaattaggtttaaagaagggtatatttttgataagtagattgtagatgaaaaggaatttttatatttgttatatagggtagtttttttattaaaatttattttttttatattaataaagttattttttattttatttaggtttttaaatattaacgtaggtcgggcgtggtggtttatgtttgtaattttagtatttttaggaggttgaggtaggtggattatttgaggttaggagtttaagattagttaggataatatagtaaaattttgtttttattgaaaatataaaaaaaaagtagttgggtgtggtggcgtatgtttgtaattttagttatttaggaggttgaggcgggagaatcgtttgaattcggaggcggaggttgtggtgagtcgagattacgttattgtattttagtttaggtaatagagtaagattttattttaaaaagatagtaataaaaaataaatattaatgcggtataatgatatttaagtgtttttttttggaaagtttgtttttttgggatatatagtttaaggtggttatgatgtgttatttttttttaatttgtgggtaaagtttattaattttagaaaagtattggaatttaggttttggtatttgtttttatagttttttgttttgatttagtgtttgttagagtggttattggatttggttattaattggtattgtaggatgtagggtgtattttgtgagagtgaaggtaagttatagttggttagtattagaattgggatgtttagagtttaggtttttttttatattcgtagtattaataaataataataataataaaaaatttaaaaaaaaaattttttattgaggttgttaaatttgttaattttgaaattgaatgtattaagagatggggtttagttttgttatttaggttggagtatggtgattatttataggggtagttatagtatattatgttttagaatttttgggtttaagagatttttttgttttggttttttaggtaatcgggattataggtttgttattatgttcggttagaacgttattttaaatagatttttttgagtagttatttaatattagttagttatttttaaatttgtaggttttgattaatgtgagggtatatttgagataatttaaatttatattttaagttattaattttaatgtgttagttaataattgggaagttatttttttggtaatatgagaaataagagttttaaagatttaagtaagaatatatttttagtgtttttattttgagggatatgagttagtttgttgagtagttatttggtatagtttttatgagttaggttgtgagtcgttttcggtttagtagttagtatggagtagaagttataggaggtgagtcgttggtttgttgttatcgaggaggatattgagatatgagtgttttttaagttgtgtagaattttggtatgtgaggaggatggttgtgatatatggatttaatttttttgaagttattgtttttttatattttaattggttaaaagataagtaggtgaggttattaaaaggtagtagatttcgatagtttttgaaaatgggaagagtgaaatttttgtgttgtttttatagagtagtgtgtggagtaggaagtatttcgttattgtgtttatttagggtaaaggtcggattaaatagtttttttatttgttatgtagcggggaggattagttggagaggttgtttttggtttttatattttagtgtaaaaattattttgtgaaaaatgtagttgttattttttttttttaagattttgattttgttttagttaggatttaggaatttgtattttaatatgtatattaggaattttgatgtttaaggttgagtaaaattgatttagggcgtatagatagaggatgttttagtgtggggttttagttgggttttattgtttggggtagttttaggaggaataggttaaaagggatttgaattgaattttttattttgtattttttttgaggagaagtgaggttagattaattaggtgatgggggttagtaatggggagatttttaaggagaggggaattaatttttttggttaggagatgatgggtaagagtttatgttttagggttatttttttttaattgaagggtgtattttgttatattgttaatattttagtttatttattgttgttttttttttaagttgttgagttattaggtaaaaatagatgtatgagtggatggggtttttattgtagaagatgttatattttgtattgtttagtgtagaagttattggttaatttatttaaattgataataaaatcgagttttttagttgtattagttgtatttaaatgtttagtagatatatgtggttagtggttattttatgagatagtgtaaatacggaataattttattattatagatatttttatgatatagtattgttttagagagtagagaggaatttagtggaaggttgtttagggagtagggagtttagttgagaatggagagtagagggttttttttatagggttggaaatgtagatgtgttatgtaggagatttaaggtttaagtttttgtttttgtttttttttttttttatttaaatttttattttttttaggtttatattattgttaatttagtattaattataaattatattttagtttttttgtaggatttaatttttttttagaaaatgtgtaaaaatattttttgtataataaagtaattttatattttaatttcgtaattatagaattgttattttaggtatattttgtagtgaatgtatttgtgtaatattttttttatttttgtttataagattgttattttgtaggttaagttgggggtgagaaagtatagagttgttatagtttgtttattagtaagtagtttttttttatttttttttttttatatattttggtttttaaattaattaaaatagaagggttttaagagtttgggagttagaagggggatgggagtttttattatattttattgttataagtaaaaaataattaataaaaattaattttttttaatagg

SEQ ID NO: 72 - DNA, 10132 bp, Artificial Sequence
  chemically treated genomic DNA (Homo sapiens)
tttattaaaaaaagttgatttttgttaattattttttatttatggtagtaaaatatagtaggaatttttattttttttttgatttttaaatttttaagatttttttgttttggttagtttaaaagttaaagtatgtgaagaaaaggaaatgaagggaaattgtttattaataaataaattataatagttttatgtttttttatttttaatttgatttgtaaaataataattttataaatagaaatggagaaaatattatataaatgtatttattgtaaaatatgtttagagtaatagttttgtgattacggagttgaaatatgaagttgttttgttatgtagaaaatgtttttgtatattttttgaaaaagaattaagttttataggaaaattgaaatatagtttgtggttaatgttggattagtagtggtgtaagtttggaagaggtagaagtttgggtggaggaagggaagggtaagggtaaagatttggattttggattttttgtatgatatatttgtatttttaattttgtaaggggagttttttgttttttatttttaattggattttttattttttggatagttttttattgaatttttttttattttttagagtagtgttatgttatggaagtgtttgtgatggtggaattgtttcgtatttgtattgttttataaggtagttattggttatatgtgtttattgagtatttaaatgtagttaatgtaattgaggaattcgattttattgttaatttaaatgaattggttagtggtttttatattggatagtgtaaagtgtggtattttttataataaaggttttatttatttatgtatttgtttttatttgatagtttaatagtttagaggggagatagtaatgaataaattgaaatattagtagtatagtaagatgtattttttagttgaggaagaatgattttaaagtatggatttttatttattattttttagttaaaagggttggtttttttttttttagagatttttttattattagtttttattatttgattgatttaattttatttttttttaaaaaaaatataaggtggggaatttagtttaagttttttttagtttattttttttggaattgttttaagtaatgagatttaattaagattttatattaaggtattttttgtttgtacgttttaagttagttttgtttaattttgggtattagaatttttggtgtgtatgttaaaatgtagatttttggattttaattgaggtagaattagaattttggaggaaggaggtgatagttgtattttttataaagtgatttttatattaaggtgtgagagttaaaagtaatttttttaattggtttttttcgttgtatggtagatgagaaagttgtttaattcgatttttgttttaggtgagtatagtaacgaggtattttttattttatatattgttttatgaagatagtatagggattttattttttttatttttaaaagttgtcggaatttattgttttttgataattttatttgtttattttttaattaattagagtataaagaaataataattttaagaaaattaaatttatatgttataattattttttttatatgttaaaattttgtataatttggaaagtatttatgttttagtgtttttttcggtggtagtaggttagcggtttattttttgtggtttttgttttatattgattgttgagtcgaaggcggtttataatttaatttatggaagttgtgttaaatggttgtttagtaaattaatttatattttttagggtgaaaatattggagatgtatttttgtttgggtttttaaaatttttgttttttatattgttaaagaagtagttttttagttgttagttgatatattaaaattaataatttaagatgtgagtttgggttgttttaaatatgtttttatattagttaagatttataggtttaggaatggttaattagtattaagtagttgtttaagaaaatttgtttaaaatgacgttttggtcgggtatagtggtaagtttatagtttcggttatttggaaggttaaggtaggaggattttttgagtttaagagttttaggatatagtgtgttatgattgtttttgtgaatagttattatattttagtttgggtaatagagttagattttattttttaatatatttagttttaaagttaatagatttggtaattttagtgagggattttttttttaagttttttgttgttgttgttgtttgttaatgttacggatgtagaaaaaaatttaggttttggatattttaattttgatgttggttagttgtaatttatttttatttttataaagtgtattttgtattttgtagtattagttaatgattaggtttagtggttattttagtaaatattgaattagaataaaaagttatggagatagatgttaggatttaagttttaatatttttttggagttgataaattttatttatagattgagagaaaataatatattatgattattttgagttgtgtattttaagaagataagttttttagaagggggtatttaagtattattatgtcgtattaatatttattttttattattatttttttgggatggagttttgttttgttgtttaggttggagtgtagtggcgtggtttcggtttattataattttcgttttcgggtttaagcgattttttcgttttagttttttgagtagttgggattataggtatgcgttattatatttagttattttttttttgtatttttagtagagatagggttttgttatgttgttttggttggttttgaatttttggttttaagtgatttatttgttttagttttttggaagtgttgggattataagtatgagttattacgttcggtttgcgttaatatttaaaaatttggataaagtaagaaatagttttattgatatggagaaaataaattttaatgaaggagttattttgtataatagatatagaaatttttttttatttgtaatttatttattaaaaatgtgtttttttttaaatttgatttttgatttttttttattttttttttttgagatagagtttttttttgtcgtttaggttgtagtgtagtggcgtaattttggtttattgtaagtttatttttaggttttaagcgatttttttgttttagtttttttagtagttgggattagaggcgtttattattgtgtttggttttttttttatttttttttttttgtaggataatgtaattgttatttttttattttttaaattagtttaggttttataaaattaattatttttttttttattttattttaatttgatagtttttttagataattttgttagttattatttgttgatggtttgatgttttagatattttattttatagttttatagtttaggaatagggatagagaaagtgggttaggcgtgttaaggtcggtaaagtgaagttgggattgaaagttagtttatttatagattttaaagtttttgtaggtttatttttacgtagttttttttattcgagatcggttatttttttaaattttgtttaattttttaaacgatttcggttattttattgttatcgtttttatttattgtattttttatgaaaatttatttatcggttttattaataatgtatttagtaattttatgtagagtaatttttattaggtttagaatatgtattggggagtgcggtggaggaagaagaggaagggagtaggtgagtgaaggaaagtttcggtttttcgtttttagagattgtaattggattttgtattgtgtttttaggataaggttatttatttattttttttacgattatgtgatttttatagtttgtttttggagtattattttttttgtgtagtaaaatataaagagtttttaaataaaggtattttaattaattgtaggcgtttcgttttttttttttttttttttttttgattcgaagttttattttgtcgtcgaggttggagtgtagtggggcgatttcggtttattgtaatttttatttttagggtttaaacgatttttttgttttagtttttttagtagtttgcgtttaggtttggttaatttttttgtatttttagtagagacggggttttatcgtgttagttaggttggtcgagaattttcgatttttggtgattcgttcgtttcggttttttaaagtgttgggattataaggcgtgagttattacggtcggttaattgtaggcgtttcgatttttttgtttgttttattttggttaggtttgaagtttttaaattttattagtaataagtgatagaacgtacgtttttagtagttgattattttgtagaaaaaagttattgtggttttggtttaaatcgatagatagtagtaggttttttggatgaagaagagagatatcggggtgtgttggtcgttaggaattggtcgtttttagttgaagttcgggaggatttagggttttggttcgggtatttcgcgggtttgttatgtttttattatgattcggcggaataattttttttttttatttttcgaagtgagtaaataaaagatttaatttttaatattttaaacggttaggtgtgggggaacgttaggttcgcgtggggatagttttttaaggtttaaatagtcggggcgtttcgaaagcgtttatcgtttcggaggataaaggcggtaggggtacgtttcggcgtcggcgtcgttattcgggatcgttaggaggcggtagttaggttttcgagtgttttttagattgaagcgcgaaatcgtttttattcgttttgagcgttttaatttaagagtgtaatttttttaggtcgttttgtaaagtcgaaggaattcgcggttttatttcggttcgcgcgttcggtttattaattttcgttttttttttagtcggagtaagacgtagatttgttcggtgtttagtcgacgttttttgtttatttgtcgggtgttttttgcggagtttcgaggtcgagtttattgtagttaaacgcgtagttagatattttgtttttttttttttgaagttataggttttcgggttcggtttcgttttcggttttttttcggcggtttcgttttttgttttcgagcgtggggttagttggttttgattgcgcgtcgttcgggttttcgtggatcgggttggttttttttagagttaaagttttttttagtcgtttcggagttcgcggggattaagagcgcgggggtagggagaggtacgcggttttcgtttttaggttcgttgggattaatcgtgttttggggatatgttagttgttattcggggggatatatagatcgtttagttcgaggtaattttatattatttgtgtgagttcggatttatttaattttagttgttttaaatatttgttattttttattttgttatgtttgtattttttagaggtataggtatagattgttttatatcgtttagtagatattgtttgtattttaatattggttcgttttgtgtttttgtgttatattttggtattttcgtaatattttaaaattttttattgttattatgtttgttgttgtgatttgtgattagtaatttttaatattattgtaattgttttggggtattatgaatcgcgtttataaaggaaggggaaattaatttataagttttgtatgtgtttggattgttttatcgaattttttttttttttttttttttttggggtttttttatttttggaaatataattttgaaattaggttaattaataattttataaaggtttttaagtgtttaaatgaaaggaagagtttgttattttaaattaaaagtaaatatgattaagttagtgaggaagtaatgttggtaggtagaaagttaggttttttgttttagttagttaagttgtgagtgtaaaggagaaaagttaagttatgaatgtaaaggaaaaaattttgaaggaaattaaaaatgttattttagtaaatatataaaagataataaagttaaatagttttattgttgatatggagaaagttttagttggtttggatagaagataaaaatagttataatatttttttaagttaaagtttaatttagagtaaggttttaattttttaattttatggaggttgagagaggtgagggaattgtaaaagaaaagttggaagttagtagagaggatggtttttgaggtttaaggaaagaaattatttttatgatataaaagtgtaaggtgaagtagtaggtgttaacgtagaagttgtattaggttatttagatttagttaaaattattgataaaggtagttatattaaataataattttttgtttttgagatagttttgttttgttattaaggttggagtatagtggtgcgattttttgtaatttttgttttttgggtttaaacgatttttttgttttagttttttaagtaattgggattataggatgtgttattatgtttaggttaattttgtatttttagtagagatagagttttattatgtttggttaggttggttttgaatttttgattttgagtaatttgttcgtttcggttttttaaagtgttgggattataggtgtgagttatcgtgtttagttaaaataatagattttaaatgtatatgaaacggttttttattggaagaagattttatttaagatttttatagttagagagaagttaatgtttgtttttaaagttttaaagaataggttgatgtttttgttaggggttaatataattgatgattttaaagttaatatttttttattattttgaaaattttagtgtttttaagaattatgttaaatatgatttataaatggattaataaaggttagttagtgatagtatatttatttatagtatggtttagagaatatttaaagtttattgttgagttttagtgtttagaagaaaggttttttttaaaatattattttttattgataatatatttggttatttaagagttttgatagagatgtatagagattgatgttgttatcgtgtttgttaatataatatttattttgaagtttagggattaaggagaaattttgatttttaagttttatttataaaatatattttataaggttatagttgttattatgatttttttgatagttttgagtaaagtaaattgaaaattttttggaaaggatttattattcgagatgttattaagaatatttgtgatttatgggaggttaaaatatttatttacggtatgtaattagagattagagggggaaaaaaagaaaaacgaaaaattaaaagtatatgtattagttatagtggtttatgtttgtaaatttagtattttgggaggttaaggtggattgtttgaggttaggagttttgagattagtttaggtaataatgtaagattttgtttttataatttttttttttttttaattagttaagagtggtggtatatgtttgtatttttagtaatttaggatattaagatggtaggattatttgagtttaagtttgaggttgtagttagttgattgtgttattgtattttagtttgggtgatagagtaagatattttttaaaaaaaaaaaaaaaaaaaaaaaaaaaatatatatatatatatatatatatatatataatatatataaaatatatatataaatatttaaaaattatatatattttaattggtatattgggtggtattttataggtaggataatatatttatttattttatatatatatatatatatatatatatatatatatatatatatatatatatatatatatatatatatattatatataggtatatgtatatatttttatattaataggagtttgaaagaagttaattttaatttttattattgatgttgaggggtttaagattttagtgagggaagttattgtagatgtggtagaagtagtaagataaatagaattggaagtggggtttgaaaatgtggttgtattgttgttattttatgataaaattttgatagatgaggagatgttttttacggatgagtaaagaaagtggtttattgagatagaatttatttttggtgaatatgttgtgaattgtgtttaaatgataataaaggatttagggtattagttgataaagtagtggtagggtttggggggattgattttaattttgaaagaaggtttgtggataaaatgttattaaatagtattatatgttatagggaaatttttagtgaatggaataattaatggatggttaggtgtagtggtttatgtttgtaattttaggattttgggaggttaggagttcgagtttagattggttaatatggtaaaattttgtttttattaaaaataataaaaattagtcgggtacggtggtaggtatttgtaattttagttatttaggaggttgaggtataagaattatttgaattaggaggtagaggttgtagtgagttaagattatgttattgtattttagtttgagtgatagaacgagattttattttaaaataaataaaaaaatgaagtaaatttttttattgttttattttaagagattgttagttattttagtttttagtaattattattttaattagttagtagtttttaataatattttatattaatatttataattcgttgaaggtttagatgatttttagtattttttagtaatattttaaaattaaggtatatatattatttttttagatatgttattgtatatttaatagattatattttagtatgaaaaatttttatatgtattgggaaattagaaaatttgtgtgatttttttattggtggtttggaattaaattcgaaatttttttgaggtattttatagggggtggtatatatgtttttgttttatgtgtagttttttttttagtgtaagttattttgtaggatttgtagtaatttattttaaatgttttttgtatatgaaatttgggttaaagtaaattggaggtaatttttggattttttttttttttttttgagatagtttagttgttgttgtttaggttggagtgtaatggtatgattttagtttatcgtaatttttgtcgttcgggtttaagcgatttttttgttttggttttttaagtagttaggattataggcgtgtattattatgtttggttaattttgtatttttagtagagatggggtttttttatgttggttaggttggtattaaattttcgatttggtatttgtttattttggttttttagaatgttgggattacgggtatgagttacgatatttggttttttttggattttttaaatttggtttttataggtagagttaatttagggatagaattatgtagaaatttatagaatgatgagggtttttagataatggtgttttttggggagagtatgttgttttattttaaaaatagtagttaaatagtgtgttaataaggtgttatggggtgtttaatgttggatttaatttagtttttttttgggtggttggttattgtaaaaaatttattttgataatgtttttagatttgatgaaacggtggttttattttttgtaatttttttggattttgtaattttaaaagtaagtaattttagagtgggaaaaaaattaaaatgtgttaaggtattatttttaatatattaaaataagtataatgaatatttaagaaataagtataaggaatttattttatattattatttgggagagaaaaaatttaatttggtaatttttatatgtgtttgtggtttaagttttgatgttattagagtacgaaattaaagaagggtttttatttaaattatttattgtttattgtatgtataaaatattttagaaattattgttttagtaatttattttgtaataaagatatggaatttttatattttttttgtatggtggttgtgatgattgggttaagtgattgtgaaggatttagaatattgtttgttatgtgaagagtttaatgaatattggttattattattttgttgtattcgttggaaatagtagtggtattttttggtttttttattatttattttagttgttttgtatgtg

SEQ ID NO: 73 - DNA, 5001 bp, Artificial Sequence
  chemically treated genomic DNA (Homo sapiens)
aagtttaaaagataattgttttagtatttaatttaaaaaatataaattagttagatatagtggtgtgtatttgtagtcggagttatttaggagattgagataagaggattatttgagtttaagggtttgagattagtttgggtaatagcgagatttagtttaaaaaaagaaaaaaaaacgttaataataataaaaaaatttattcgtttattaaattatttgtaaggcgtttgaatgaaaggtgttttttttattgtggttttgtttagggtatttatagttgtaggtgagttaatttgtttggttttgttttttttaggtttgtttttttatgatttatttgtgtgagaaaattatttttacgttgtttttttggaggaagtttaatggatttaattagttgatgtcgttgtagtagtttgtgtacgacgtgtaggattagttgaattttttggttagcgaggaggattttaggcgtattgtttagtagttttatagtataggcgaggtgagtttttgggagtttaggtagggggtcgtgagaggtgttagggatttagtttgttttaaattttagtttttggaagtggtgtgagtttggggaagtagtgtggaaatggtttagttaatttataatatttttatacgtgtgataaatatagttttaagtgacgttttgaattgtagttttcggtttattttaggagttgttattttgttttgtcgtgttttgtttttatttttagagtttgttagtttgggagtgtagtgtttattgttttgggtgattgggtttttttttattttttttgggtattaggaatttaatttgttatttttggtagtttttaggatggtttttttgtattagcgtggagttattagttttatatagattttttgggtgggaaaatagttgagaaaaggtagtgaggtgtttttgtggaggtaatgtttggagatataaagatagagaattttggtgtatagatatatagagtaattataattaaagatgtatattaaaaaattttagtaagtaatgtttagtagaaatgattgagaatgggaggttttgttttggttttgtgatattgagtattagggcgcggtttggaaattttgttttaatggtattatatgtttgttttaggaacgggggtagtgttttcgtgtttttttattatgtgaaattgggagtttatatgaattagtgtgggttaagaagagcggttttgaatattgtaattaaaagtagttttgagattattaaaagttagatgtttatttttttaattttaggtgttaggtttggttttatagttagtttgtatgagttatataaattttttgaaattaaatttgaatttataagttagtgattttgaaaattggagtcgtcgggtagtaattttattagtttttaaatttttagttaaatggttagagaatttgttaatttatttaggaatattttaaagtgattgaatttaaggaagaatataggtgaaggattatattttagatgataagatattgttggatgtaaaaaatgtgttaattttaattttaaatttttttggtataggagttttttgttttttagtagtagattagtaattttttagattatattatatagttttttttatttgttattatatttttgtttgtttttgagagtttagtaagtaaatgaagatgtaaagaaggagggtaattaggtagtaggaattatattgtgtggttcgattttgattggtttcgggttttttttagatttgtttttcgtatttaatttgtagatttttagaattttttagtggtttttttgattttgttttttggtttagggttttatattacgtttagttgattgttttagttttttgtttttttttattatgggatagtttcgttttttttgagtttgaggcgatgagtagtgtttaggattaaattgtaaatggtattttagtaaatgttgtattaggaattagattaatattggttttgttttttagaatttttaatttaggtttaattttgaatagatttttagatagggggtattttttaggtttaagttagattgtggtaggaaattattgtgtggtttcggtggggttagagtttttaagtgagggagtttagggcgatggttattttttaagaaaggaagtagaatttttttataaagggaaagttttttttgttttttgttattttttttttttttttttttatttttttaagaaataaatataattaaaaagttaaagtttttttgggttattatttttggttttatttttttttttttttttcggaggttaattattattatggtagtatatttttttaggttttttttatgtgtgtgtgttaaatatttatataatggtataataatagaatgttttgatttttttttgaaaatgtttttaagtttttagagaagttgtaaggatagtattatgaatttttatataggttatatttatttatttttttaattaattaattaatttttttttttttttttttgagatagagttttattttgttgttaaggttggagtgtagtggtataatttcggtttattgtagttttcgttttttgggtttaagtgattttgttttagtttatagatataagttattatatttaattaaattttgtatttttagaagagatagggttttattatgttggttaggttggttttaaatttttgattttaagtgatttattcgtttcggttttttaaagtgttgggattataggtatgagttacggtgtttagtttattatatttaagttgattagttgttgatattttgttatatttgttcgattttttttttttttatttatttatttatttattttgtagatatgatgatattttttttttaaataatttagtttatattttttaaggagaaggatatttttttatataatttaatataattgatgattttagaaatataatattaatatagtattatgattgaatatattatttttatataagggtttgttattggttttaataattttttttaaagttatttttatttatgtatttattttgggatttagaatttagtttaaaattatttattgtatttggttgttattttttatttttttttttttttttatttcgttggtttttttgaagattttaggggagttgttttttagaatttttattttgatatttttaagttgtttttttttattcggtgtttggtttttgagacgtatttacgtggaatggttttgggttattttttagagtatttgtttagtttttgttgtcggtattaggttttttagtgttttaagtggttggtgtatttggttagggttttgtttttaagcgtgattttttgttgttttttcgtagattaatattatgtaaagtgaaatagtttaggacgtgttgtttttggattttcgttggttttgtataaacgttttggggaagttgttgttcgtggagattttacgggcgttgtattattatcggggtcgttatatcgtggaggatatttagcgtttggtgttcgatagcgacgtggaggagttgttgtagattttcgatgttatggatatttgcgttcgggatttgagtagcgggattatggtggacgttttagttttgattaagatagataatttgtatcgtttttgggttgatgaggaggacgaggtgatggtgtatggtggcgtgcgtatcgtgttcgtggaatattttattttttttttatgtggtattttttataaggtttaggtgaatttgtgtcggtggatttattagtaaagtatagagggcgacgcggatattcgtttgtgggtgaatggttgtaagttggttaatcgtggggtcgagttgttggtgttgttggttaattacggttagggtattgaggtttaggttcgcggtttggagacggagaagattaagtgttgtttgttgttggattcggtgtgtagtattattgagaacgttatggttattacgttgttagggtttttgatcgtgaagtattatttgagtttttagtagttgcgggagtattatgagttcgttatgatttattagttacgggatttttttcgggtatagattttgaaggaaattttattgattaatattatgggggggtataaggaaagttttagtagtattatgtgtttcgggtgttacgacgtttatttataggttagtttcggtatggatatttatgtattagatttgaatttttttattcggaggaaattgagtcgtttgttggattcgttcgattttttggggaaggattggtgttttttcgttatgaatttaggtttttttgatttcgtggtaaagtataatattagtaacggggtttttaaggattttttttttagttttttttacgttttgttgcgggaatggattatttattttgagagtatagtgggtatttttatgtttaaattgagggagttgggtcgtcgggatgtcgtagattttttgttgaaggtattttttgtgtttaaaattaatttggatggtaatggttaggaggtttatgtttcgagttgtaatagcggtattttttataattttattagttttgttgtatttcggtgagggtagtttttggtttgggtagggtttgtttggattgtagaagtaagggggtgatgtagtttatttttttttttggagatgttgagggtgtttttttttgtatttatagttagggggatgttattttttttttcggtttgatttgtttttttgtcgttattttttttttcgttttatttcgttgtttgtggatggttattgtagtttaagagtagaatagattttttattttggtcgtttgaaaagttagtgtatttttttttagtgttttggattttattttttattttttagtattttgttttttattgataattttgttggaatttttaattttttaatgatattt

SEQ ID NO: 74 - DNA, 5001 bp, Artificial Sequence
  chemically treated genomic DNA (Homo sapiens)
aaatgttattgaaaagttaggaattttagtaaaattattagtaagaagtaaggtattggaggatgagagatggagtttaaaatattgagaggaggtatattagttttttaagcggttaaagtaaaagatttgttttgtttttaaattgtaatgattatttatagataacggaatgagacggggagggaggtagcggtagagaaataggttaagtcggagggaggagtggtatttttttggttgtgggtgtaggaagaaatatttttagtatttttaaagggaaggatgggttatattatttttttgtttttgtagtttaaatagattttgtttaagttagaggttgtttttatcgggatataatagagttaatggaattgtaagaggtgtcgttgttgtagttcgaggtataggttttttggttattgttatttaggttgattttgaatatagaggatgtttttagtaaaaagtttgcggtatttcggcgatttagtttttttagtttggatatgagggtgtttattgtgtttttagggtaggtggtttattttcgtagtagggcgtggagggggttggggaggaaatttttgggagtttcgttattggtgttgtattttgttacgaggttagggaggtttaagtttatggcgagaaggtattagtttttttttagggggtcgggcgggtttagtaggcgatttagtttttttcgagtgaggaggtttaggtttgatgtatggatgtttatgtcgaggttggtttgtgagtagacgtcgtgatattcgaagtatatgatgttgttgaagttttttttgtatttttttatggtgttggttagtgaggttttttttagagtttgtgttcggaagaagtttcgtggttggtagattatgacgggtttatggtgttttcgtagttgttgggggtttaggtaatgttttacggttaggagttttggtagcgtggtggttatgacgtttttaatggtgttgtatatcgagtttagtagtaggtagtatttgatttttttcgtttttaggtcgcggatttggattttaatgttttggtcgtggttgattagtagtattagtagttcggttttacggttggttagtttgtagttatttatttataggcggatgttcgcgtcgttttttgtgttttgttggtggatttatcggtataggtttatttggattttgtgaaagatgttatatgggaagggggtgaggtgttttacgggtacgatgcgtacgttattatatattattatttcgttttttttattagtttaggagcggtgtaggttgtttgttttgattagggttgggacgtttattatggtttcgttgtttaggtttcgggcgtagatgtttatggtatcgaggatttgtagtagtttttttacgtcgttgtcgggtattaggcgttggatgttttttacggtgtagcggtttcggtagtggtgtagcgttcgtggggtttttacggatagtaatttttttaggacgtttgtgtagagttagcgggggtttaggagtagtacgttttgaattgttttattttgtatgatgttgatttgcggggggataatagaaagttacgtttagggatagagttttggttaggtgtattagttatttagagtattaaagggtttgatgtcggtaatagaggttgagtagatgttttaaggagtgatttaaggttattttacgtggatgcgttttaaaaattaaatatcgagtggagaaaagtagtttgaaaatgttagaatagagattttgaaaaataatttttttgaagtttttaaaaaggttagcgaaatgaaagaagaaaaaaaaatgggagatggtaattaaatgtaatgagtgattttagattggattttgaattttaaaataagtatataaataaaaatagttttaaaagaaattattgggattagtggtaaatttttgtatgaggatgatatatttaattatagtattatattaatgttatgtttttggaattattaattatattgggttatgtgggaaaatatttttttttttaggagatataggttaaattatttagggaagaaatgttattatgtttgtaaaataaataagtaaataaatagaaaggaaaggaatcgagtaaatgtagtaaaatgttaataattgattagtttaaatgtagtaggttgggtatcgtgatttatgtttgtaattttagtattttgggaggtcgaggcgggtggattatttgaggttaggagtttgagattagtttggttaatatggtaaaattttgttttttttaaaaatataaaatttagttgggtgtgatggtttgtgtttgtaggttgaggtagaattatttgaatttaggaggcggaggttgtagtgagtcgagattgtgttattgtattttagttttggtaatagagtgagattttattttaaaaaaaaaaaaaaaaaaattaattaattaattaaaaaaataaataaatgtagtttatatgagagtttatggtattatttttgtaatttttttaaaggtttgagaatatttttaaaaaagagttagaatattttattattatattattatgtgaatgtttaatatatatatatagaaaaggtttgaaaggatatgttgttatgataatagttggttttcgagaaggggagagaggagtgagattagagatgatggtttaaggggattttagttttttggttgtgtttattttttaaaaaaataaaaagaaaggaaaaaaaagtgataaaaaatagaaggaattttttttttatggaagagttttgtttttttttttggagagtggttatcgttttggatttttttatttggaggttttgattttatcgggattatatagtaattttttgttatagtttggtttaaatttaaaagatgttttttgtttaagagtttatttagaattgaatttaggttgaaaattttggagggtagagttaatattgatttagtttttgatatagtatttgttggaatattatttgtagtttggttttaaatattgtttatcgttttaggtttaggaaagacgaaattgttttatagtggaggagaatagggagttaagatagttagttaaacgtagtgtgggattttgggttagaaaatagagttagaagggttattggggagttttgaagatttgtaaattagatacggaaggtaggtttggaggaggttcggggttaattaaagtcgggttatataatgtagtttttgttgtttaattattttttttttttatatttttatttatttattaaatttttaagggtaagtagggatgtaatgataaataaaggagattatatgatatgatttagaaagttgttggtttattattagaaagtaagggatttttgtgttaaaggagtttagaattagaattgatatattttttatatttagtagtattttgttatttaagatgtggttttttatttgtgtttttttttggatttaattattttaaagtatttttggatgagttggtagattttttggttatttaattgggagtttaaaggttgatgaaattattgttcggcgattttagtttttaaggttattggtttgtggatttaggtttagttttaagaaatttgtatgatttatataaattggttatagggttagatttggtatttgagattggggaggtaagtatttggtttttaataattttagagttgtttttagttgtaatatttagaatcgttttttttggtttatattagtttatgtaggtttttaattttatatggtggagaaatacgaaggtattgttttcgtttttgggataggtatatgatgttattagaatagggtttttaaatcgcgttttggtgtttaatgttatagaattagagtaaagttttttatttttaattatttttgttgggtattgtttgttagagttttttaatgtgtatttttaattatgattattttgtgtatttgtgtattagagttttttgtttttgtatttttagatattgtttttataaggatattttattgtttttttttaattgtttttttatttaggagatttgtgtggagttgatgattttacgttgatataaagaagttattttgaaggttgttaggagtagtagattaagtttttggtgtttagggggagtgaagagagatttagttatttagggtagtgggtattgtatttttaaattaatagattttggaaataaaagtaaaatacgataagataaaatgatagtttttaaggtgagtcgagaattgtagtttagagcgttatttgaggttgtgtttgttatacgtgtggaaatgttgtaggttagttggattatttttatattgtttttttaggtttatattatttttaagagttggaatttgggataggttgagtttttggtattttttacggttttttgtttgggtttttaggggtttatttcgtttgtgttgtggagttgttgagtaatgcgtttgaggtttttttcgttggttagggggtttagttggttttgtacgtcgtatataaattgttgtagcgatattagttggttgggtttattgagttttttttaggaaggtagcgtggagatgatttttttatataggtgagttatgggaggatagatttagagggggtagggttagataggttaatttatttgtagttgtgggtgttttgagtagagttatagtggaaaggatattttttatttaggcgttttgtaggtgatttgatgaacgagtgggtttttttgttgttgttgacgtttttttttttttttttagattgggtttcgttattgtttaggttggttttaaatttttgggtttaagtaatttttttgttttagttttttgagtagtttcgattataagtatatattattgtgtttggttagtttgtgttttttgggttgagtattggggtagttgttttttagattt

SEQ ID NO: 75 - DNA, 20 bp, Artificial Sequence
  DAPK1 primer
attaatattatgtaaagtga

SEQ ID NO: 76 - DNA, 20 bp, Artificial Sequence
  DAPK1 primer
cttacaaccattcacccaca

SEQ ID NO: 77 - DNA, 18 bp, Artificial Sequence
  DAPK1 detection oligo
gttatatcgtggaggata

SEQ ID NO: 78 - DNA, 18 bp, Artificial Sequence
  DAPK1 detection oligo
gttatattgtggaggata
